(19) United States
(12) Patent Application Publication
(10) Pub. No.: US 2023/0002761 A1
(43) Pub. Date: Jan. 5, 2023

(54) ANTI-BACTERIAL CRISPR COMPOSITIONS AND METHODS

(71) Applicant: BENSON HILL, INC., St. Louis, MO (US)

(72) Inventors: Benjamin Neil Gray, St. Louis, MO (US); Gina Christine Neumann, Manchester, MO (US)

(73) Assignee: BENSON HILL, INC., St. Louis, MO (US)

(21) Appl. No.: 17/777,833

(22) PCT Filed: Nov. 19, 2020
(86) PCT No.: PCT/IB2020/060935

§ 371 Date: May 18, 2022

Related U.S. Application Data
(60) Provisional application No. 62/937,534, filed on Nov. 19, 2019.

(51) Int. Cl. C12N 15/11; C12N 9/22; C12N 15/90; C12N 15/70

(52) U.S. Cl. CPC C12N 15/11; C12N 9/22; C12N 15/902; C12N 15/70; C12N 2310/20; C12N 2800/80

(57) ABSTRACT

Compositions and methods for targeting pre-determined DNA sequences in bacterial cells are provided. The methods result in the targeted elimination of bacterial cells that comprise the pre-determined DNA sequence(s). Compositions comprise DNA constructs comprising nucleotide sequences that encode a Cms1 protein operably linked to a promoter that is operable in the cells of interest. Methods to use these DNA constructs to selectively target and eliminate bacterial cells that harbor the targeted DNA sequence(s) are described herein.

### FIELD OF THE INVENTION

[0001] The present invention relates to compositions and methods for selectively killing bacterial cells in a sequence-specific manner.

### REFERENCE TO A SEQUENCE LISTING SUBMITTED AS A TEXT FILE VIA EFS-WEB

[0002] The official copy of the sequence listing is submitted concurrently with the specification as a text file via EFS-Web, in compliance with the American Standard Code for Information Interchange (ASCII), with a file name of BHP033P2 Sequence Listing_ST25.txt, a creation date of Oct. 15, 2020, and a size of 2,080 Kb. The sequence listing filed via EFS-Web is part of the specification and is hereby incorporated in its entirety by reference herein.

### BACKGROUND OF THE INVENTION

[0003] Various bacterial species and bacterial strains are known to cause deleterious effects in wide-ranging systems. For example, pathogenic bacteria are known to cause disease in humans, animals, and plants. These pathogenic bacteria may be found, for example, in the digestive tract, urinary tract, respiratory tract, on or in leaves, stems, root tissues, fruits, and other tissues. Furthermore, pathogenic bacteria may be transmitted by insects or other organisms. Methods to selectively eliminate these pathogenic bacteria from the organisms that are harmed by their presence are highly desirable.

[0004] Additionally, various bacterial species and bacterial strains are known to grow on crop plants and other food products. These bacteria can cause adverse effects when the food products are consumed. Methods to selectively eliminate these pathogenic bacteria from the crops and other food products that serve as hosts for these harmful bacteria are highly desirable.

[0005] Harmful bacteria are often controlled, for example, with antibiotic chemicals or with bacteriophages. These bacterial control methods are effective in many cases, but antibiotic resistant bacteria have emerged as important health threats and bacteriophage-based bacterial control methods may be hampered by an inability to sufficiently eliminate harmful bacteria. Improved methods for the elimination of harmful bacteria are highly desirable.

[0006] CRISPR systems have been proposed as a possible technology that may be adapted to selectively eliminate unwanted and/or harmful bacteria (Gomaa et al (2014) mBio e00928-13), with a focus on Type I CRISPR systems because these CRISPR systems have a processive DNase activity wherein the CRISPR nuclease hybridizes with the targeted sequence, then processively degrades DNA following this hybridization, sometimes resulting in the near complete elimination of the targeted DNA molecule (e.g., a targeted plasmid, viral DNA molecule, circular bacterial genome, or other DNA molecule). While these properties of Type I CRISPR systems may be desirable in some applications, Type I CRISPR systems also have some drawbacks. For instance, Type I CRISPR systems are typically large, multi-component systems. Their size can make packaging of Type I CRISPR systems in commonly used plasmids, viral vectors, and other vectors difficult. Furthermore, Type I CRISPR systems may not show optimal activity in some of the bacterial strains and/or species that it may be desirable to eliminate. While CRISPR systems show promise in their ability to target and eliminate undesirable bacterial strains and/or species, alternatives to Type I CRISPR systems would be valuable. Cas9-based CRISPR systems have been explored for their ability to selectively eliminate bacteria (Citorik et al (2014) Nat Biotechnol 32:1141-1145; Bikard et al (2014) Nat Biotechnol 32:1146-1150; U.S. patent application Ser. No. 14/475,785); however these systems may be hampered by the mechanism of Cas9 nucleases. Because Cas9 nucleases make a single DSB, repair of this DSB may result in survival of the bacteria.

[0007] Some Type V CRISPR enzymes have been shown to harbor a primary, sequence-specific, activity against a particular type of substrate; following this sequence-specific primary activity, the Type V enzyme is then able to access a secondary, collateral activity in a non-sequence-specific manner. As an example, Cpf1 (Cas12a) has been shown to harbor primary double-stranded break production activity against double-stranded DNA (dsDNA). After Cpf1 hybridizes with and cleaves its primary target, the protein is then capable of cleaving single-stranded DNA (ssDNA) in a non-sequence-specific manner (Chen et al (2018) Science 360:436-439). Other Type V CRISPR enzymes have been shown, for example, to harbor a primary activity against RNA, with secondary activities directed against RNA and ssDNA (Yan et al (2019) Science 363:88-91). The present invention describes the primary and secondary activities of Cms1 enzymes, a group of Type V CRISPR enzymes whose secondary activities can result in bacterial cell death.

### SUMMARY OF THE INVENTION

[0008] Compositions and methods for selectively killing bacterial cells using Cms1 CRISPR systems are provided. The methods result in cell death for those bacterial cells that harbor particular pre-determined and targeted DNA sequences leaving other bacterial cells that do not comprise the targeted DNA sequences unharmed. Compositions comprise DNA constructs comprising nucleotide sequences that encode a Cms1 protein operably linked to a promoter that is operable in the cells of interest. In some embodiments, the compositions further comprise nucleotide sequences that encode at least one guide RNA that can interact with a Cms1 protein of the invention and can guide the Cms1 protein to bind with a pre-determined DNA sequence. In some embodiments, the compositions are part of a bacteriophage that is capable of infecting the bacterial cell(s) of interest. The DNA constructs comprising polynucleotide sequences that encode the Cms1 proteins of the invention, or the Cms1 proteins of the invention themselves, can be used to direct the Cms1 protein to hybridize with genomic DNA in a bacterial cell or cells of interest at pre-determined genomic loci, with this hybridization in turn leading to Cms1-mediated cell death. Methods to use these DNA constructs to selectively target and eliminate bacterial strains and/or species are described herein.

### BRIEF DESCRIPTION OF THE DRAWINGS

[0009] FIG. 1 shows a phylogenetic tree drawn from a MUSCLE alignment of the Cms1 protein sequences of the present invention. Sm-type, Sulf-type, and Unk40-type Cms1 nucleases are indicated by black, red, and blue lines, respectively.

[0010] FIG. 2 shows a summary of amino acid motifs shared among Sm-type Cms1 proteins. The weblogo figures in boxes 1-10 correspond to SEQ ID NOs:1-10, respectively, and their locations on the SmCms1 protein (SEQ ID NO:41) are shown.

[0011] FIG. 3 shows a summary of amino acid motifs shared among Sulf-type Cms1 proteins. The weblogo figures in boxes 1-17 correspond to SEQ ID NOs: 11-27, respectively, and their locations on the SulfCms1 protein (SEQ ID NO:42) are shown.

[0012] FIG. 4 shows a summary of amino acid motifs shared among Unk40-type Cms1 proteins. The weblogo figures in boxes 1-7 correspond to SEQ ID NOs: 28-34, respectively, and their locations on the Unk40Cms1 protein (SEQ ID NO:88) are shown.

### DETAILED DESCRIPTION OF THE INVENTION

[0013] Methods and compositions are provided herein for the selective targeting and elimination of bacterial species and/or bacterial strains that harbor certain pre-determined DNA sequences through the use of the CRISPR-Cms system and components thereof. The CRISPR enzymes of the invention are selected from a Cms enzyme, e.g. a Cms1 ortholog or a mutated Cms1 enzyme. Cms1 is an abbreviation for CRISPR from Microgenomates and Smithella, and is so named because some bacterial species in these groups encode Cms1 nucleases; the terms Csm1 and Cms1 may be used interchangeably. Cms1 nucleases may also be referred to as Cas12f nucleases. The methods and compositions include nucleic acids to bind target DNA sequences. This is advantageous as nucleic acids are much easier and less expensive to produce than, for example, peptides, and the specificity can be varied according to the length of the stretch where homology is sought. Complex 3-D positioning of multiple fingers, for example is not required. In some preferred embodiments, the nucleic acids are guide polynucleotides such as guide RNAs (gRNAs; alternatively CRISPR RNAs or crRNAs) that are capable of interacting with a Cms1 enzyme and of hybridizing with a DNA sequence through base pairing. As used herein, guide RNAs that are capable of interacting or that are designed to interact with a Cms1 polypeptide can bind, associate with, or otherwise form a complex with the Cms1 polypeptide. Methods of measuring interaction of gRNAs with Cms1 polypeptide are well known in the art.

[0014] Also provided are nucleic acids encoding the Cms1 polypeptides, as well as methods of using Cms1 polypeptides to target specific DNA sequences of bacterial host cells. The targeted DNA sequences may be present in genomic DNA, plasmid DNA, or other DNA elements harbored within the targeted bacterial cells. The Cms1 polypeptides interact with specific guide polynucleotides such as guide RNAs (gRNAs), which direct the Cms1 endonuclease to a specific target site. Without being limited by theory, the Cms1-gRNA complex hybridizes with the targeted DNA sequence (the “initial hybridization event”), at which site the Cms1 endonuclease introduces a double-stranded break (DSB). This process of hybridization and DSB production leads to a change in the structure of the Cms1 protein, resulting in a protein that is capable of degrading double-stranded DNA (dsDNA) and/or RNA in a non-sequence-specific manner, leading to cell death. Since the specificity of the initial hybridization event is provided by the guide RNA, the Cms1 polypeptide is universal and can be used with different guide RNAs to target different genomic sequences. Cms1-associated CRISPR arrays are processed into mature crRNAs without the requirement of an additional trans-activating crRNA (tracrRNA). Cms1 proteins can process crRNA arrays that include multiple spacer sequences; the compositions of the invention include, in some embodiments, crRNA arrays with multiple spacer sequences designed to target multiple different loci within the bacterial strain and/or bacterial species of interest. Cms1-gRNA systems can target DNA sequences adjacent to a variety of protospacer-adjacent motif (PAM) sequences, with the PAM sequence located immediately 5′ of the DNA sequence targeted by Cms1. The initial hybridization event is sequence-specific with limited off target effects, resulting in sequence-specific killing of bacterial cells of interest without harming bacterial cells that do not harbor the sequence(s) of interest.

### I. Cms1 Endonucleases and Guide Polynucleotides

[0015] Provided herein are Cms1 endonucleases, and fragments and variants thereof, for use in targeting sequences within bacterial cells, for example within genomic DNA, plasmids, or other DNA-containing elements found in bacterial cells. As used herein, the term Cms1 endonucleases or Cms1 polypeptides refers to homologs, orthologs, and variants of the Cms1 polypeptide sequences set forth in SEQ ID NOs:41-160 and 340-341. Typically, Cms1 endonucleases can act without the use of tracrRNAs, requiring on a single gRNA for sequence specificity. In general, a Cms1-gRNA complex can perform an initial hybridization event to target a particular sequence. Without being limited by theory, following this initial hybridization event, the Cms1 protein is then able to perform a secondary collateral activity directed against double-stranded DNA (dsDNA) or RNA without any sequence specificity. This collateral activity results in cell death in those cells in which the Cms1-gRNA complex undergoes an initial hybridization event. In general, Cms1 polypeptides comprise at least one RNA recognition and/or RNA binding domain. RNA recognition and/or RNA binding domains interact with guide RNAs. Typically the guide RNA comprises a region with a stem-loop structure that interacts with the Cms1 polypeptide. This stem-loop often comprises the sequence UCUACN3-5GUAGAU (SEQ ID NOs:35-37, encoded by SEQ ID NOs:38-40), with “UCUAC” and “GUAGA” base-pairing to form the stem of the stem-loop. N3-5 denotes that any base may be present at this location, and 3, 4, or 5 nucleotides may be included at this location. Some CRISPR nucleases have been shown to function with guide polynucleotides in which some of the ribonucleotide residues have been replaced by deoxyribonucleotide residues (Yin et al (2018) Nat Chem Biol 14:311-316; U.S. Pat. No. 9,650,617); the present invention also encompasses embodiments in which the guide polynucleotide is a guide RNA, embodiments in which the guide polynucleotide is a guide DNA, and embodiments in which the guide polynucleotide comprises both DNA and RNA residues. In specific embodiments, a Cms1 polypeptide, or a polynucleotide encoding a Cms1 polypeptide, comprises: an RNA-binding portion that interacts with the DNA-targeting RNA, and an activity portion that exhibits site-directed enzymatic activity, such as a RuvC endonuclease domain. Without being limited by theory, the RuvC endonuclease domain may also exhibit secondary, collateral activity directed against dsDNA and/or RNA in a non-sequence-specific manner.

[0016] Cms1 polypeptides can be wild type Cms1 polypeptides, modified Cms1 polypeptides, or a fragment of a wild type or modified Cms1 polypeptide. The Cms1 polypeptide can be modified to increase nucleic acid binding affinity and/or specificity, alter an enzymatic activity, and/or change another property of the protein. For example, nuclease (i.e., DNase, RNase) domains of the Cms1 polypeptide can be modified, deleted, or inactivated. Alternatively, the Cms1 polypeptide can be modified or truncated to alter or remove domains that are not essential for the function of the protein.

[0017] In some embodiments, the Cms1 polypeptide can be derived from a wild type Cms1 polypeptide or fragment thereof. In other embodiments, the Cms1 polypeptide can be derived from a modified Cms1 polypeptide. For example, the amino acid sequence of the Cms1 polypeptide can be modified to alter one or more properties (e.g., nuclease activity, affinity, stability, solubility, etc.) of the protein.

[0018] In general, a Cms1 polypeptide comprises at least one nuclease domain, but need not contain an HNH domain such as the one found in Cas9 proteins. For example, a Cms1 polypeptide can comprise a RuvC or RuvC-like nuclease domain. Without being limited by theory, the RuvC or RuvC-like domain may comprise three catalytic residues that are typically aspartate, glutamate, and aspartate, respectively, and may be responsible for the Cms1 nuclease activity.

[0019] In some embodiments, the Cms1 polypeptide can comprise at least one cell-penetrating domain. The cell-penetrating domain can be located at the N-terminus, the C-terminus, or in an internal location of the protein.

[0020] In still other embodiments, the Cms1 polypeptide can also comprise at least one marker domain. Non-limiting examples of marker domains include fluorescent proteins, purification tags, and epitope tags. In certain embodiments, the marker domain can be a fluorescent protein. Non limiting examples of suitable fluorescent proteins include green fluorescent proteins (e.g., GFP, GFP-2, tagGFP, turboGFP, EGFP, Emerald, Azami Green, Monomeric Azami Green, CopGFP, AceGFP, ZsGreen1), yellow fluorescent proteins (e.g. YFP, EYFP, Citrine, Venus, YPet, PhiYFP, ZsYellowl), blue fluorescent proteins (e.g. EBFP, EBFP2, Azurite, mKalama1, GFPuv, Sapphire, T-sapphire), cyan fluorescent proteins (e.g. ECFP, Cerulean, CyPet, AmCyanl, Midoriishi-Cyan), red fluorescent proteins (mKate, mKate2, mPlum, DsRed monomer, mCherry, mRFP1, DsRed-Express, DsRed2, DsRed-Monomer, HcRed-Tandem, HcRed1, AsRed2, eqFP611, mRasberry, mStrawberry, Jred), and orange fluorescent proteins (mOrange, mKO, Kusabira-Orange, Monomeric Kusabira-Orange, mTangerine, tdTomato) or any other suitable fluorescent protein. In other embodiments, the marker domain can be a purification tag and/or an epitope tag. Exemplary tags include, but are not limited to, glutathione-S-transferase (GST), chitin binding protein (CBP), maltose binding protein, thioredoxin (TRX), poly(NANP), tandem affinity purification (TAP) tag, myc, AcV5, AU1, AU5, E, ECS, E2, FLAG, HA, nus, Softag 1, Softag 3, Strep, SBP, Glu-Glu, HSV, KT3, S, 51, T7, V5, VSV-G, 6×His, biotin carboxyl carrier protein (BCCP), and calmodulin.

[0021] In certain embodiments, the Cms1 polypeptide may be part of a protein-RNA complex comprising a guide polynucleotide. In some embodiments, the guide polynucleotide may be a guide RNA. The guide polynucleotide interacts with the Cms1 polypeptide to direct the Cms1 polypeptide to a specific target site in a bacterial cell, where the target site comprises dsDNA that may be present in genomic DNA, plasmid DNA, or other DNA components in a bacterial cell of interest. If a suitable protospacer-adjacent motif (PAM) sequence is present immediately 5′ of the target sequence, the Cms1-guide polynucleotide complex may hybridize with the dsDNA target sequence. Following this initial hybridization event, the Cms1 enzyme may cleave the target DNA. Without being limited by theory, the Cms1 enzyme may then undergo a structural change that may allow the Cms1 enzyme to cleave dsDNA and/or RNA in a non-sequence-specific manner (“secondary” or “collateral” activity). This secondary activity may result in bacterial cell death. As used herein, the term “DNA-targeting RNA” refers to a guide RNA that interacts with the Cms1 polypeptide and the target site of the nucleotide sequence of interest in the genome of a plant cell. A DNA-targeting RNA, or a DNA polynucleotide encoding a DNA-targeting RNA, can comprise: a first segment comprising a nucleotide sequence that is complementary to a sequence in the target DNA, and a second segment that interacts with a Cms1 polypeptide.

[0022] Cms proteins for use in the invention include, but are not limited to, Cms1 proteins that comprise at least one amino acid motif selected from the group consisting of SEQ ID NOs:1-10. In other embodiments, a Cms1 protein comprises at least one amino acid motif selected from the group consisting of SEQ ID NOs:11-27. In other embodiments, a Cms1 protein comprises at least one amino acid motif selected from the group consisting of SEQ ID NOs:28-34. In certain preferred embodiments, a Cms1 protein comprises more than one amino acid motif selected from the group consisting of SEQ ID NOs:1-10. In certain preferred embodiments, a Cms1 protein comprises more than one amino acid motif selected from the group consisting of SEQ ID NOs:11-27. In certain preferred embodiments, a Cms1 protein comprises more than one amino acid motif selected from the group consisting of SEQ ID NOs:28-34. Particular Cms1 protein sequences are set forth in SEQ ID NOs:41-160 and 340-341; particular Cms1 protein-encoding polynucleotide sequences are set forth in SEQ ID NOs:161-317 and 342-343. In certain preferred embodiments, a Cms1 protein has at least about 80% identity with a sequence selected from the group consisting of SEQ ID NOs:41-160 and 340-341.

[0023] The polynucleotides encoding Cms1 polypeptides disclosed herein can be used to isolate corresponding sequences from other prokaryotic or eukaryotic organisms, or from metagenomically-derived sequences whose native host organism is unclear or unknown. In this manner, methods such as PCR, hybridization, and the like can be used to identify such sequences based on their sequence homology or identity to the sequences set forth herein. Sequences isolated based on their sequence identity to the entire Cms1 sequences set forth herein or to variants and fragments thereof are encompassed by the present invention. Such sequences include sequences that are orthologs of the disclosed Cms1 sequences. “Orthologs” is intended to mean genes derived from a common ancestral gene and which are found in different species as a result of speciation. Genes found in different species are considered orthologs when their nucleotide sequences and/or their encoded protein sequences share at least about 75%, about 80%, about 85%, about 90%, about 91%, about 92%, about 93%, about 94%, about 95%, about 96%, about 97%, about 98%, about 99%, or greater sequence identity. Functions of orthologs are often highly conserved among species. Thus, isolated polynucleotides that encode polypeptides having Cms1 endonuclease activity and which share at least about 75% or more sequence identity to the sequences disclosed herein, are encompassed by the present invention.

[0024] Fragments and variants of the Cms1 polynucleotides and Cms1 amino acid sequences encoded thereby that retain Cms1 nuclease activity are encompassed herein. By “Cms1 nuclease activity” is intended the binding of and hybridization with a pre-determined DNA sequence (the “targeted sequence”) as mediated by a guide RNA. Cms1 nuclease activity can further comprise double-strand break production of the targeted sequence (“primary activity”), and can further comprise non-sequence-specific nuclease activity directed against dsDNA and/or RNA (“secondary activity”) following the primary activity. By “fragment” is intended a portion of the polynucleotide or a portion of the amino acid sequence. “Variants” is intended to mean substantially similar sequences. For polynucleotides, a variant comprises a polynucleotide having deletions (i.e., truncations) at the 5′ and/or 3′ end; deletion and/or addition of one or more nucleotides at one or more internal sites in the native polynucleotide; and/or substitution of one or more nucleotides at one or more sites in the native polynucleotide. As used herein, a “native” polynucleotide or polypeptide comprises a naturally occurring nucleotide sequence or amino acid sequence, respectively. Generally, variants of a particular polynucleotide of the invention will have at least about 75%, 80%, 85%, 90%, 91%, 92%, 93%, 94%, 95%, 96%, 97%, 98%, 99% or more sequence identity to that particular polynucleotide as determined by sequence alignment programs and parameters as described elsewhere herein.

[0025] “Variant” amino acid or protein is intended to mean an amino acid or protein derived from the native amino acid or protein by deletion (so-called truncation) of one or more amino acids at the N-terminal and/or C-terminal end of the native protein; deletion and/or addition of one or more amino acids at one or more internal sites in the native protein; or substitution of one or more amino acids at one or more sites in the native protein. Variant proteins encompassed by the present invention are biologically active, that is they continue to possess the desired biological activity of the native protein. Biologically active variants of a native polypeptide will have at least about 80%, 85%, 90%, 91%, 92%, 93%, 94%, 95%, 96%, 97%, 98%, 99% or more sequence identity to the amino acid sequence for the native sequence as determined by sequence alignment programs and parameters described herein. A biologically active variant of a protein of the invention may differ from that protein by as few as 1-15 amino acid residues, as few as 1-10, such as 6-10, as few as 5, as few as 4, 3, 2, or even 1 amino acid residue.

[0026] Variant sequences may also be identified by analysis of existing databases of sequenced genomes. In this manner, corresponding sequences can be identified and used in the methods of the invention.

[0027] Methods of alignment of sequences for comparison are well known in the art. Thus, the determination of percent sequence identity between any two sequences can be accomplished using a mathematical algorithm. Non-limiting examples of such mathematical algorithms are the algorithm of Myers and Miller (1988) CABIOS 4:11-17; the local alignment algorithm of Smith et al. (1981) Adv. Appl. Math. 2:482; the global alignment algorithm of Needleman and Wunsch (1970) J. Mol. Biol. 48:443-453; the search-for-local alignment method of Pearson and Lipman (1988) Proc. Natl. Acad. Sci. 85:2444-2448; the algorithm of Karlin and Altschul (1990) Proc. Natl. Acad. Sci. USA 87:2264-2268, modified as in Karlin and Altschul (1993) Proc. Natl. Acad. Sci. USA 90:5873-5877.

[0028] Computer implementations of these mathematical algorithms can be utilized for comparison of sequences to determine sequence identity. Such implementations include, but are not limited to: CLUSTAL in the PC/Gene program (available from Intelligenetics, Mountain View, Calif.); the ALIGN program (Version 2.0) and GAP, BESTFIT, BLAST, FASTA, and TFASTA in the GCG Wisconsin Genetics Software Package, Version 10 (available from Accelrys Inc., 9685 Scranton Road, San Diego, Calif., USA). Alignments using these programs can be performed using the default parameters. The CLUSTAL program is well described by Higgins et al. (1988) Gene 73:237-244; Higgins et al. (1989) CABIOS 5:151-153; Corpet et al. (1988) Nucleic Acids Res. 16:10881-90; Huang et al. (1992) CABIOS 8:155-65; and Pearson et al. (1994) Meth. Mol. Biol. 24:307-331. The ALIGN program is based on the algorithm of Myers and Miller (1988) supra. A PAM120 weight residue table, a gap length penalty of 12, and a gap penalty of 4 can be used with the ALIGN program when comparing amino acid sequences. The MUSCLE algorithm for multiple sequence alignment may be used for comparisons of multiple nucleic acid or protein sequences (Edgar (2004) Nucleic Acids Research 32:1792-1797). The BLAST programs of Altschul et al (1990) J. Mol. Biol. 215:403 are based on the algorithm of Karlin and Altschul (1990) supra. BLAST nucleotide searches can be performed with the BLASTN program, score=100, wordlength=12, to obtain nucleotide sequences homologous to a nucleotide sequence encoding a protein of the invention. BLAST protein searches can be performed with the BLASTX program, score=50, wordlength=3, to obtain amino acid sequences homologous to a protein or polypeptide of the invention. To obtain gapped alignments for comparison purposes, Gapped BLAST (in BLAST 2.0) can be utilized as described in Altschul et al. (1997) Nucleic Acids Res. 25:3389. Alternatively, PSI-BLAST (in BLAST 2.0) can be used to perform an iterated search that detects distant relationships between molecules. See Altschul et al. (1997) supra. When utilizing BLAST, Gapped BLAST, PSI-BLAST, the default parameters of the respective programs (e.g., BLASTN for nucleotide sequences, BLASTX for proteins) can be used. See the website at www.ncbi.nlm.nih.gov. Alignment may also be performed manually by inspection.

[0029] The nucleic acid molecules encoding Cms1 polypeptides, or fragments or variants thereof, can be codon optimized for expression in a bacterial cell or organism of interest. A “codon-optimized gene” is a gene having its frequency of codon usage designed to mimic the frequency of preferred codon usage of the host cell. Nucleic acid molecules can be codon optimized, either wholly or in part. Because any one amino acid (except for methionine and tryptophan) is encoded by a number of codons, the sequence of the nucleic acid molecule may be changed without changing the encoded amino acid. Codon optimization is when one or more codons are altered at the nucleic acid level such that the amino acids are not changed but expression in a particular host organism is increased. Those having ordinary skill in the art will recognize that codon tables and other references providing preference information for a wide range of organisms are available in the art (see, e.g., Zhang et al. (1991) Gene 105:61-72; Murray et al. (1989) Nucl. Acids Res. 17:477-508).

[0030] In some embodiments, DNA encoding the Cms1 polypeptides of the invention, and DNA encoding guide polynucleotide(s) of the invention, may be included as part of a bacteriophage or modified bacteriophage, or may be included as part of a plasmid (for example a conjugative plasmid), phagemid, cosmid, or other DNA molecule capable of replication in a bacterial cell or cells of interest. The terms phage and bacteriophage may be used interchangeably. In some embodiments, a phage or a phagemid derived from M13, lambda, p22, T7, Mu, T4 phage, PBSX, P1Puna-like, P2, 13, Bcep 1, Bcep 43, Bcep 78, T5 phage, phi, C2, L5, HK97, N15, T3 phage, P37, MS2, Q.beta., or Phi X 174, T2 phage, T12 phage, R17 phage, M13 phage, G4 phage, Enterobacteria phage P2, P4 phage, N4 phage, Pseudomonas phage .PHI.6, .PHI.29 phage or 186 phage may be used to deliver a polynucleotide encoding a Cms1 polypeptide of the invention and/or one or more guide polynucleotide(s) of the invention, to the bacterial cell(s) of interest. Bacteriophage may be engineered, for example, to have a broad or narrow host range using methods known in the art (Yehl et al 2019 BioRxiv dx.doi.org/10.1101/699090).

### II. Nucleic Acids Encoding Cms1 Polypeptides

[0031] Nucleic acids encoding any of the Cms1 polypeptides or fusion proteins described herein are provided. The nucleic acid can be RNA or DNA. Examples of polynucleotides that encode Cms1 polypeptides are set forth in the group consisting of SEQ ID NOs:161-317 and 342-343. In one embodiment, the nucleic acid encoding the Cms1 polypeptide is mRNA. The mRNA can be 5′ capped and/or 3′ polyadenylated. In another embodiment, the nucleic acid encoding the Cms1 polypeptide is DNA. The DNA can be present in a phage, plasmid, or other vector.

[0032] Nucleic acids encoding the Cms1 polypeptide or fusion proteins can be codon optimized for efficient translation into protein in the cell of interest. Programs for codon optimization are available in the art (e.g., OPTIMIZER at genomes.urv.es/OPTIMIZER; OptimumGene™ from GenScript at www.genscript.com/codon_opt.html).

[0033] In certain embodiments, DNA encoding the Cms1 polypeptide can be operably linked to at least one promoter sequence. The DNA coding sequence can be operably linked to a promoter control sequence for expression in a host cell of interest, for example a bacterial cell. “Operably linked” is intended to mean a functional linkage between two or more elements. For example, an operable linkage between a promoter and a coding region of interest (e.g., region coding for a Cms1 polypeptide or guide RNA) is a functional link that allows for expression of the coding region of interest. Operably linked elements may be contiguous or non-contiguous. When used to refer to the joining of two protein coding regions, by operably linked is intended that the coding regions are in the same reading frame.

[0034] The promoter sequence can be derived from bacterial sequences, viral sequences, synthetically-designed sequences, or other sources. It is recognized that different applications can be enhanced by the use of different promoters in the nucleic acid molecules to modulate the timing, location and/or level of expression of the Cms1 polypeptide and/or guide RNA. Such nucleic acid molecules may also contain, if desired, a promoter regulatory region (e.g., one conferring inducible, constitutive, or environmentally- or developmentally-regulated expression), a transcription initiation start site, a ribosome binding site, an RNA processing signal, a transcription termination site, and/or a polyadenylation signal.

[0035] The nucleic acid sequences encoding the Cms1 polypeptide can be operably linked to a promoter sequence that is recognized by a phage RNA polymerase for in vitro mRNA synthesis. In such embodiments, the in vitro-transcribed RNA can be purified for use in the methods of genome modification and/or bacterial cell elimination described herein. For example, the promoter sequence can be a T7, T3, or SP6 promoter sequence or a variation of a T7, T3, or SP6 promoter sequence. In some embodiments, the sequence encoding the Cms1 polypeptide can be operably linked to a promoter sequence for in vitro expression of the Cms1 polypeptide. In such embodiments, the expressed protein and/or guide polynucleotide such as a guide RNA can be purified for use in the methods described herein.

[0036] The DNA encoding the Cms1 polypeptide or fusion protein can be present in a vector. Suitable vectors include engineered bacteriophages, plasmid vectors (for example conjugative plasmid vectors), phagemids, cosmids, artificial/mini-chromosomes, transposons, and viral vectors (e.g., lentiviral vectors, adeno-associated viral vectors, etc.). In one embodiment, the DNA encoding the Cms1 polypeptide is present in a plasmid vector. Non-limiting examples of suitable plasmid vectors include pUC, pBR322, pET, pBluescript, pCAMBIA, and variants thereof. The vector can comprise additional expression control sequences (e.g., enhancer sequences, Kozak sequences, polyadenylation sequences, transcriptional termination sequences, etc.), selectable marker sequences (e.g., antibiotic resistance genes), origins of replication, and the like. Additional information can be found in “Current Protocols in Molecular Biology” Ausubel et al., John Wiley & Sons, New York, 2003 or “Molecular Cloning: A Laboratory Manual” Sambrook & Russell, Cold Spring Harbor Press, Cold Spring Harbor, N.Y., 3rd edition, 2001. In some embodiments, the DNA encoding the Cms1 polypeptide is present in an engineered bacteriophage, where the native bacteriophage sequence is derived from a bacteriophage that is capable of infecting the bacterial cell(s) of interest.

[0037] In some embodiments, the expression vector comprising the sequence encoding the Cms1 polypeptide can further comprise a sequence encoding a guide RNA. The sequence encoding the guide RNA can be operably linked to at least one transcriptional control sequence for expression of the guide RNA in the cell of interest.

### III. Methods for Targeting a Nucleotide Sequence in a Bacterial Cell or Cells

[0038] Methods are provided herein for targeting a nucleotide sequence in a bacterial cell. The methods comprise introducing into a bacterial cell one or more DNA-targeting polynucleotides such as, for example, a DNA-targeting RNA (“guide RNA,” “gRNA,” “CRISPR RNA,” or “crRNA”) or a DNA polynucleotide encoding a DNA-targeting RNA, wherein the DNA-targeting polynucleotide comprises: (a) a first segment comprising a nucleotide sequence that is complementary to a sequence in the target DNA; and (b) a second segment that interacts with a Cms1 polypeptide and also introducing to the bacterial cell a Cms1 polypeptide, or a polynucleotide such as a DNA molecule or an RNA molecule encoding a Cms1 polypeptide, wherein the a Cms1 polypeptide comprises: (a) a polynucleotide-binding portion that interacts with the gRNA or other DNA-targeting polynucleotide; and (b) an activity portion that may comprise a catalytic domain such as a RuvC domain that exhibits site-directed enzymatic activity. In some embodiments, these methods result in the partial or complete killing and elimination of the bacterial cell or cells into which the Cms1 or encoding polynucleotide and guide polynucleotide have been introduced. For example, the methods described herein can result in a 5%, 10%, 15%, 20%, 25%, 30%, 50%, 75%, 80%, 85%, 90%, 95%, 96%, 97%, 98%, 99%, 100% or 5-20%, 25-50%, 50-60%, 60-75%, 50-80%, 80-90%, 80-95%, 80-99%, 90-95%, 90-99%, or more decrease in the viable bacterial population in which the Cms1 or encoding polynucleotide and guide polynucleotide have been introduced. Bacterial cell viability can be measured by any method known in the art, including plate count (e.g., CFU, CFU/g, CFU/mL), turbidity measurement, cell lysis, or any other method known in the art. In specific embodiments, bacterial cell killing as used herein refers to a bacteriostatic elimination of future bacterial growth.

[0039] The methods disclosed herein comprise introducing into a bacterial cell at least one Cms1 polypeptide or a nucleic acid encoding at least one Cms1 polypeptide, as described herein. In some embodiments, the Cms1 polypeptide can be introduced into the bacterial cell as an isolated protein. In such embodiments, the Cms1 polypeptide can further comprise at least one cell-penetrating domain, which facilitates cellular uptake of the protein. In some embodiments, the Cms1 polypeptide can be introduced into the bacterial cell as a nucleoprotein in complex with a guide polynucleotide (for instance, as a ribonucleoprotein in complex with a guide RNA). In other embodiments, the Cms1 polypeptide can be introduced into the genome host as an mRNA molecule that encodes the Cms1 polypeptide. In still other embodiments, the Cms1 polypeptide can be introduced into the bacterial cell or cells as a DNA molecule comprising an open reading frame that encodes the Cms1 polypeptide. In general, DNA sequences encoding the Cms1 polypeptide or fusion protein described herein are operably linked to a promoter sequence that will function in the bacterial cell or cells of interest. The DNA sequence can be linear, or the DNA sequence can be part of a vector. In still other embodiments, the Cms1 polypeptide can be introduced into the bacterial cell or cells as an RNA-protein complex comprising the guide RNA. In certain embodiments, the Cms1 polypeptide, Cms1-gRNA ribonucleoprotein complex, and/or Cms1-encoding polynucleotide can be introduced into the bacterial cell or cells of interest via nanoparticle-aided transformation (Kumari et al 2017 FEMS Microbiol Lett 364:fnx081; French 2019 BioRxiv dx.doi.org/10.1101/559252).

[0040] In certain embodiments, DNA encoding the Cms1 polypeptide can further comprise a sequence encoding one or more guide RNAs. In general, each of the sequences encoding the Cms1 polypeptide and the guide RNA(s) is operably linked to one or more appropriate promoter sequences that enable expression of the Cms1 polypeptide and the guide RNA(s), respectively, in the bacterial cell or cells of interest. The DNA sequence encoding the Cms1 polypeptide and the guide RNA(s) can further comprise additional expression control, regulatory, and/or processing sequence(s). The DNA sequence encoding the Cms1 polypeptide and the guide RNA(s) can be linear or can be part of a vector.

[0041] Methods described herein further can also comprise introducing into a bacterial cell or cells at least one guide RNA or DNA encoding at least one polynucleotide such as a guide RNA. A guide RNA interacts with the Cms1 polypeptide to direct the Cms1 polypeptide to a specific target site, at which site the guide RNA base pairs with a specific DNA sequence in the targeted site. Guide RNAs can comprise three regions: a first region that is complementary to the target site in the targeted DNA sequence, a second region that forms a stem loop structure, and a third region that remains essentially single-stranded. The first region of each guide RNA is different such that each guide RNA guides a Cms1 polypeptide to a specific target site. The second and third regions of each guide RNA can be the same in all guide RNAs.

[0042] One region of the guide RNA is complementary to a sequence (i.e., protospacer sequence) at the target site in the targeted DNA such that the first region of the guide RNA can base pair with the target site. In various embodiments, the first region of the guide RNA can comprise from about 8 nucleotides to more than about 30 nucleotides. For example, the region of base pairing between the first region of the guide RNA and the target site in the nucleotide sequence can be about 8, about 9, about 10, about 11, about 12, about 13, about 14, about 15, about 16, about 17, about 18, about 19, about 20, about 22, about 23, about 24, about 25, about 27, about 30 or more than 30 nucleotides in length. In an exemplary embodiment, the first region of the guide RNA is about 20, 21, 22, 23, 24, or 25 nucleotides in length. The guide RNA also can comprise a second region that forms a secondary structure. In some embodiments, the secondary structure comprises a stem or hairpin. The length of the stem can vary. For example, the stem can range from about 5, to about 6, to about 10, to about 15, to about 20, to about 25 base pairs in length. The stem can comprise one or more bulges of 1 to about 10 nucleotides. In some preferred embodiments, the hairpin structure comprises the sequence UCUACN3-5GUAGAU (SEQ ID NOs:35-37, encoded by SEQ ID NOs:38-40), with “UCUAC” and “GUAGA” base-pairing to form the stem. “N3-5” indicates 3, 4, or 5 nucleotides. Thus, the overall length of the second region can range from about 14 to about 25 nucleotides in length. In certain embodiments, the loop is about 3, 4, or 5 nucleotides in length and the stem comprises about 5, 6, 7, 8, 9, or 10 base pairs.

[0043] The guide RNA can also comprise a third region that remains essentially single-stranded. Thus, the third region has no complementarity to any nucleotide sequence in the cell of interest and has no complementarity to the rest of the guide RNA. The length of the third region can vary. In general, the third region is more than about 4 nucleotides in length. For example, the length of the third region can range from about 5 to about 60 nucleotides in length. The combined length of the second and third regions (also called the universal or scaffold region) of the guide RNA can range from about 30 to about 120 nucleotides in length. In one aspect, the combined length of the second and third regions of the guide RNA range from about 40 to about 45 nucleotides in length.

[0044] In a preferred embodiment, the guide RNA comprises a single molecule comprising all three regions. In other embodiments, the guide RNA can comprise two separate molecules. The first RNA molecule can comprise the first region of the guide RNA and one half of the “stem” of the second region of the guide RNA. The second RNA molecule can comprise the other half of the “stem” of the second region of the guide RNA and the third region of the guide RNA. Thus, in this embodiment, the first and second RNA molecules each contain a sequence of nucleotides that are complementary to one another. For example, in one embodiment, the first and second RNA molecules each comprise a sequence (of about 6 to about 25 nucleotides) that base pairs to the other sequence to form a functional guide RNA. In specific embodiments, the guide RNA is a single molecule (i.e., crRNA) that interacts with the target site in the chromosome and the Cms1 polypeptide without the need for a second guide RNA (i.e., a tracrRNA).

[0045] In certain embodiments, the guide RNA(s) can be introduced into the bacterial cell as an RNA molecule. The RNA molecule can be transcribed in vitro. Alternatively, the RNA molecule can be chemically synthesized. In other embodiments, the guide RNA can be introduced into the genome host as a DNA molecule that encodes the guide RNA. In such cases, the DNA encoding the guide RNA can be operably linked to one or more promoter sequences for expression of the guide RNA in the bacterial cell or cells of interest.

[0046] In some embodiments, multiple guide RNAs may be designed to target multiple target sequences in the bacterial cell(s) of interest and may be introduced into the bacterial cell(s) of interest in the form of a CRISPR array in the format direct repeat-spacer-direct repeat-spacer, etc., repeating for the number of desired spacers. In these CRISPR arrays, the direct repeat sequences represent the portion of the gRNA that is recognized by Cms1. The direct repeat is processed by Cms1 enzymes to generate mature crRNAs that associate with the Cms1 protein to form the ribonucleoprotein complex that hybridizes with the targeted sequences in the bacterial cell(s) of interest. Direct repeat sequences for use with Cms1 enzymes may take the form, for example, of one or more of the sequences set forth in SEQ ID NOs:35-40. In some embodiments, multiple guide RNAs may be designed to target multiple target sequences in the bacterial cell(s) of interest and may be introduced into the bacterial cell(s) of interest in the form of a CRISPR array in which the mature gRNAs are processed by ribozymes or by tRNA processing pathways (WO 2019/138052; Port and Bullock (2016) BioRxiv dx.doi.org/10.1101/046417).

[0047] The DNA molecule encoding the Cms1 enzyme and/or the guide RNA(s) can be linear or circular. In some embodiments, the DNA sequence encoding the Cms1 enzyme and/or the guide RNA(s) can be part of a vector. Suitable vectors include plasmid vectors (for example conjugative plasmid vectors), phagemids, cosmids, artificial/mini-chromosomes, transposons, and viral vectors. In an exemplary embodiment, the DNA encoding the Cms1 enzyme and/or the guide RNA(s) is present in a plasmid vector. Non-limiting examples of suitable plasmid vectors include pUC, pBR322, pET, pBluescript, pCAMBIA, and variants thereof. The vector can comprise additional expression control sequences (e.g., enhancer sequences, Kozak sequences, polyadenylation sequences, transcriptional termination sequences, etc.), selectable marker sequences (e.g., antibiotic resistance genes), origins of replication, and the like. In another exemplary embodiment, the DNA encoding the Cms1 enzyme and/or the guide RNA(s) can be part of a phagemid.

[0048] In embodiments in which both the Cms1 polypeptide and the guide RNA(s) are introduced into the genome host as DNA molecules, each can be part of a separate molecule (e.g., one vector containing Cms1 polypeptide or fusion protein coding sequence and a second vector containing guide RNA coding sequence(s)) or both can be part of the same molecule (e.g., one vector containing coding (and regulatory) sequence for both the Cms1 polypeptide and the guide RNA(s)).

[0049] A Cms1 polypeptide in conjunction with a guide RNA is directed to a target site (i.e., a targeted DNA sequence or target sequence) in a bacterial cell, wherein the Cms1 polypeptide hybridizes with the targeted DNA sequence (the “initial hybridization event”) and produces a double-stranded break (i.e., cleavage) in the targeted DNA sequence. The cleavage site can be located anywhere within the target sequence. Without being limited by theory, this initial hybridization event triggers a conformational change in the Cms1 polypeptide that allows the Cms1 polypeptide to degrade RNA and/or dsDNA in a non-sequence-specific manner. The target site has no sequence limitation except that the sequence is immediately preceded (upstream) by a consensus sequence. This consensus sequence is also known as a protospacer adjacent motif (PAM). Examples of PAM sequences include, but are not limited to, TTTN, NTTN, TTTV, and NTTV (wherein N is defined as any nucleotide and V is defined as A, G, or C). It is well-known in the art that a suitable PAM sequence must be located at the correct location relative to the targeted DNA sequence to allow the Cms1 nuclease to produce the desired double-stranded break. For all Cms1 nucleases characterized to date, the PAM sequence is located immediately 5′ of the targeted DNA sequence. Thus, the targeted sequence is immediately downstreatm (3′) of the PAM sequence. The PAM site requirements for a given Cms1 nuclease cannot at present be predicted computationally, and instead must be determined experimentally using methods available in the art (Zetsche et al. (2015) Cell 163:759-771; Marshall et al. (2018) Mol Cell 69:146-157). It is well-known in the art that PAM sequence specificity for a given nuclease enzyme is affected by enzyme concentration (Karvelis et al. (2015) Genome Biol 16:253). Thus, modulating the concentrations of Cms1 protein delivered to the cell or in vitro system of interest represents a way to alter the PAM site requirements associated with that Cms1 enzyme. Modulating Cms1 protein concentration in the system of interest may be achieved, for instance, by altering the promoter used to express the Cms1-encoding gene, by altering the concentration of ribonucleoprotein delivered to the cell or in vitro system, or by adding or removing introns that may play a role in modulating gene expression levels. As detailed herein, the first region of the guide RNA is complementary to the protospacer of the target sequence. Typically, the first region of the guide RNA is about 19 to 25 nucleotides in length.

[0050] The target site can be in the coding region of a gene, in an intron of a gene, in a control region of a gene, in a non-coding region between genes, etc. The gene can be a protein coding gene or an RNA coding gene. The gene can be any gene of interest as described herein. Cms1 collateral activity against RNA and/or dsDNA may be activated through an in initial hybridization event with any DNA sequence(s) in the bacterial cell(s) of interest as long as a suitable PAM site is located 5′ of the target sequence(s).

[0051] In some embodiments, the Cms1 protein, or Cms1 protein-encoding polynucleotide, and guide RNA(s), or DNA encoding the guide RNA(s), are introduced into a plurality of bacterial cells with the guide RNA(s) designed to target sequences that are present only in a certain fraction of the cells. In some embodiments, this will result in the elimination or reduction of those cells that comprise the targeted sequence(s) that the guide RNA(s) are designed to hybridize with.

[0052] By “predetermined” or “targeted sequence” is intended a nucleotide (e.g., DNA or RNA) sequence in the microbe of interest that is unique to that microbe. The predetermined or targeted sequence may be genomic DNA, chromosomal DNA, and/or plasmid or other extrachromosomal DNA sequences present in the cell or cells of interest. Methods are available in the art to find unique sequences within genomes and include using a Pan-Core genome approach to find accessory genes of organisms. Additionally using a Best Bi-directional Blast analysis or using OrthoMCL etc, would identify accessory genes. Additionally, unique regions between a pair of genomes can be extracted from a pair-wise global alignment performed using any of the popular programs like Nucmer (MUMmer), Mauve, BLAST, and the like. In some embodiments, a targeted sequence of interest is a sequence that is part of an antibiotic resistance gene. Antibiotic resistance gene sequences are known in the art and include, for example and without limitation, GyrB, ParE, ParY, AAC(1), AAC(2′), AAC(3), AAC(6′), ANT(2″), ANT(3″), ANT(4′), ANT(6), ANT(9), APH(2″), APH(3″), APH(3′), APH(4), APH(6), APH(7″), APH(9), ArmA, RmtA, RmtB, RmtC, Sgm, AER, BLA1, CTX-M, KPC, SHV, TEM, BlaB, CcrA, IMP, NDM, VIM, ACT, AmpC, CMY, LAT, PDC, OXA β-lactamase, mecA, Omp36, OmpF, PIB (por), bla (blaI, blaR1) and mec (mecI, mecR1) operons, Chloramphenicol acetyltransferase (CAT), Chloramphenicol phosphotransferase, EmbB, Mupirocin-resistant isoleucyl-tRNA synthetases MupA, MupB, MprF, Cfr 23S rRNA methyltransferase, Rifampin ADP-ribosyltransferase (Arr), Rifampin glycosyltransferase, Rifampin monooxygenase, Rifampin phosphotransferase, Rifampin resistance RNA polymerase-binding proteins DnaA, RbpA, Rifampin-resistant beta-subunit of RNA polymerase (RpoB), Cfr 23S rRNA methyltransferase, Erm 23S rRNA methyltransferases (e.g., ErmA, ErmB, Erm(31)), Streptogramin resistance ATP-binding cassette (ABC) efflux pumps (e.g., Lsa, MsrA, Vga, VgaB), Streptogramin Vgb lyase, Vat acetyltransferase, Fluoroquinolone acetyltransferase, Fluoroquinolone-resistant DNA topoisomerases, Fluoroquinolone-resistant GyrA, GyrB, ParC, Quinolone resistance protein (Qnr), FomA, FomB, FosC, FosA, FosB, FosX, VanA, VanB, VanD, VanR, VanS, EreA, EreB, GimA, Mgt, Ole, MPH(2′)-I, MPH(2′)-II, MefA, MefE, Mel, sat, Sul1, Sul2, Sul3, sulfonamide-resistant FolP, TetX, TetA, TetB, TetC, Tet30, Tet31, TetM, TetO, TetQ, Tet32, Tet36, MacAB-TolC, MsbA, MsrA,VgaB, EmrD, EmrAB-TolC, NorB, GepA, MepA, AdeABC, AcrD, MexAB-OprM, mtrCDE, adeR, acrR, baeSR, mexR, phoPQ, mtrR, and other such genes known to those of skill in the art (see, e.g., McArthur et al 2013 Antimicrobial Agents and Chemotherapy 57:3348-3357). In some embodiments, a targeted sequence is present in a plasmid, for example and without limitation a sequence that is present in a pOXA-48, pKpQIL, IncFII, p202c, HI2, HI1, Il-γ, X, L/M, N, FIA, FIB, FIC, W, Y, P, A/C, T, K, B/O, pAM830, pAM831 plasmid, and other such plasmids known to those of skill in the art.

### IV. Bacterial Species of Interest

### A. Plant-Associated Bacteria

[0053] Bacterial species that grow on plants or plant material may be targeted and selectively eliminated by the compositions and methods of the present invention. Non-limiting examples of plant- or plant-material associated bacterial species of interest include Xanthomonas sp., Escherichia sp., Pseudomonas sp., Erwinia sp., Xylella sp., Clavibacter sp., Ralstonia sp., Pectobacterium sp., Streptomyces sp., Burkholderia sp., Phytoplasma sp., Acidovorax sp., Pantoea sp., Agrobacterium sp., Spiroplasma sp., Candidatus Liberibacter sp., Dickeya sp., Serratia sp., Sphingomonas sp., Rhizobacter sp., Rhizomonas sp., Xylophilus sp., Rickettsia sp., Bacillus sp., Clostridium sp., Arthrobacter sp., Curtobacterium sp., Leifsonia sp., Rhodococcus sp., and Phytoplasma sp. Plant-associated bacteria may include, for example, plant pathogens, nodulating bacteria, bacteria that grow on plants and may harm humans or other animals that consume the plant material, or other bacteria. The methods of the present invention may be applied pre-harvest (i.e., during plant growth) or post-harvest, or may be applied to seeds or isolated plant cells or cell cultures, plant parts, and may be applied, for example, to leaves, flowers, seeds, roots, stems, or other plant tissues. In some embodiments, the compositions and methods of the present invention may be used to reduce the number of cells of a given bacterial strain or species, or to eliminate all or nearly all of the cells of a given bacterial strain or species. In some embodiments, the compositions and methods of the present invention may be used to selectively target and eliminate (in whole or in part) only those cells of a given bacterial strain or species that harbor certain targeted sequences, whether those sequences are present in the bacterial chromosomal genome, in plasmids, in viruses or phages that have infected or are otherwise present in the bacteria, or in other DNA-containing components found in those bacterial cells.

### B. Animal-Associated Bacteria

[0054] Bacterial species that grow in or on animals or animal parts (e.g., meat, bones, teeth, organs, etc.) may be targeted and selectively eliminated by the compositions and methods of the present invention. Non-limiting examples of such animal-associated bacterial species of interest include Escherichia sp., Enterobacter sp., Citrobacter sp., Klebsiella sp., Hafnia sp., Corynebacterium sp., Mycoplasma sp., Serratia sp., Pasteurella sp., Proteus sp., Campylobacter sp., Salmonella sp., Pseudomonas sp., Brucella sp., Staphylococcus sp., Streptococcus sp., Trueperella sp., Clostridium sp., Listeria sp., Anthrax sp., Bartonella sp., Capnocytophaga sp., Streptobacillus sp., Rickettsia sp., Anaplasma sp., Shigella sp., Borrelia sp., Actinomyces sp., Bacteroides sp., Bordetella sp., Chlamydia sp., Chlamydophila sp., Ehrlichia sp., Enterococcus sp., Francisella sp., Haemophilus sp., Helicobacter sp., Legionella sp., Leptospira sp., Mycobacterium sp., Neisseria sp., Nocardia sp., Treponema sp., Vibrio sp., and Yersinia sp. Animal-associated bacteria may include, for example, bacteria that live in or on oral cavities, gut tissues (e.g., stomach, intestines, etc.), stool, genitalia, skin, hair, eyes, ears, nasal cavities, the bloodstream, and/or the tissues of the respiratory system, and the like. Animal-associated bacteria may also live on animal parts in dead animals, for example, in animal meat, skin, bones, organs, brain, and/or other tissues. The methods of the present invention may be applied to living animals, for example to reduce or eliminate harmful bacteria such as pathogenic bacteria that may cause health problems for the animal that harbors the bacterial cell(s) of interest. The methods of the present invention may be applied to animal parts such as, for example, meat or other products intended for consumption by humans or other animals, for example to reduce or eliminate the presence of harmful or potentially harmful bacteria such as those that may cause disease in humans or animals that consume the animal parts. In some embodiments, the compositions and methods of the present invention may be used to selectively target and eliminate (in whole or in part) only those cells of a given bacterial strain or species that harbor certain targeted sequences, whether those sequences are present in the bacterial chromosomal genome, in plasmids, in viruses or phages that have infected or are otherwise present in the bacteria, or in other DNA-containing components found in those bacterial cells.

### C. Human-Associated Bacteria

[0055] Bacterial species that grow in or on humans represent a subset of those bacteria that grow in or on animals or animal parts and may be targeted and selectively eliminated by the compositions and methods of the present invention. Non-limiting examples of such human-associated bacterial species of interest include Escherichia sp., Enterobacter sp., Citrobacter sp., Klebsiella sp., Hafnia sp., Corynebacterium sp., Mycoplasma sp., Serratia sp., Pasteurella sp., Proteus sp., Campylobacter sp., Salmonella sp., Pseudomonas sp., Brucella sp., Staphylococcus sp., Streptococcus sp., Trueperella sp., Clostridium sp., Listeria sp., Anthrax sp., Bartonella sp., Capnocytophaga sp., Streptobacillus sp., Rickettsia sp., Anaplasma sp., Shigella sp., Borrelia sp., Actinomyces sp., Bacteroides sp., Bordetella sp., Chlamydia sp., Chlamydophila sp., Ehrlichia sp., Enterococcus sp., Francisella sp., Haemophilus sp., Helicobacter sp., Klebsiella sp., Legionella sp., Leptospira sp., Mycobacterium sp., Neisseria sp., Nocardia sp., Treponema sp., Vibrio sp., and Yersinia sp. Human-associated bacteria may include, for example, bacteria that live in or on oral cavities, gut tissues (e.g., stomach, intestines, etc.), stool, genitalia, skin, hair, eyes, ears, nasal cavities, the bloodstream, and/or the tissues of the respiratory system, and the like. The methods of the present invention may be applied therapeutically, for example to reduce or eliminate harmful bacteria such as pathogenic bacteria that may cause health problems for the human that harbors the bacterial cell(s) of interest. The compositions of the present invention may be delivered to humans through various routes of administration, for example through inhalation, ingestion, injection, or other routes of administration. In some embodiments, the compositions and methods of the present invention may be used to selectively target and eliminate (in whole or in part) only those cells of a given bacterial strain or species that harbor certain targeted sequences, whether those sequences are present in the bacterial chromosomal genome, in plasmids, in viruses or phages that have infected or are otherwise present in the bacteria, or in other DNA-containing components found in those bacterial cells.

### D. Fungus-Associated Bacteria

[0056] Bacterial species that grow in close contact with fungal organisms or cells may be targeted and selectively eliminated by the compositions and methods of the present invention. For example, bacteria that interfere with fungal culture and/or fungal fermentation may be targeted for control, elimination, or reduction by the compositions and methods of the present invention. Non-limiting examples of such fungus-associated bacterial species of interest include Enterobacter sp., Pseudomonas sp., Klebsiella sp., Serratia sp., Staphylococcus sp., Escherichia sp., Clostridium sp., Enterococcus sp., and other such bacterial species. In some embodiments, the compositions and methods of the present invention may be used to selectively target and eliminate (in whole or in part) only those cells of a given bacterial strain or species that harbor certain targeted sequences, whether those sequences are present in the bacterial chromosomal genome, in plasmids, in viruses or phages that have infected or are otherwise present in the bacteria, or in other DNA-containing components found in those bacterial cells.

### E. Arthropod-Associated Bacteria

[0057] Bacterial species that grow in close contact with arthropods or other insects may be targeted and selectively eliminated by the compositions and methods of the present invention. For example, some arthropods are known to harbor symbiotic bacteria that may be selectively reduced or eliminated using the compositions and methods of the present invention. Some arthropod species that may be of particular interest for use with the compositions and methods of the present invention include those that transmit disease to humans or animals (non-limiting examples include ticks and mosquitoes), those that transmit disease to plants (non-limiting examples include aphids and psyllids), and arthropods that are farmed, for example for human consumption (non-limiting examples include shrimp, crabs, and lobsters). In some embodiments, bacteria that enable disease transmission to plants, humans, or other animals by arthropods, or bacteria that are required for disease transmission to plants, humans, or other animals by arthropods, may be targeted and selectively eliminated using the compositions and methods of the present invention. In some embodiments, bacteria that contaminate cultivated aquacultural arthropods (e.g., shrimp, crabs, lobsters, and other arthropods) may be targeted and selectively eliminated using the compositions and methods of the present invention. Non-limiting examples of such arthropod-associated bacteria include Borrelia sp., Rickettsia sp., Anaplasma sp., Francisella sp., Coxiella sp., Wolbachia sp., Ehrlichia sp., Liberibacter sp., Aeromonas sp., Vibrio sp., Edwardsiella sp., Streptococcus sp., Yersinia sp., Flavobacterium sp., Tenacibaculum sp., Renibacterium sp., Piscirickettsia sp., Mycobacterium sp., Pseudomonas sp., Clostridium sp., Enterobacterium sp., Nocardia sp., Lactococcus sp., Aerococcus sp., Hepatobacter sp., Chlamydia sp., and other such bacterial species. In some embodiments, the compositions and methods of the present invention may be used to selectively target and eliminate (in whole or in part) only those cells of a given bacterial strain or species that harbor certain targeted sequences, whether those sequences are present in the bacterial chromosomal genome, in plasmids, in viruses or phages that have infected or are otherwise present in the bacteria, or in other DNA-containing components found in those bacterial cells.

### F. Environmental Bacteria

[0058] Bacterial species that grow in the environment may be targeted and selectively eliminated by the compositions and methods of the present invention. Environments of particular interest may include, without limitation, wastewater, water intended for treatment to render it potable, surgical instruments and other materials in hospitals or other environments where sterility is required, and other such environments. In some embodiments, bacteria living in these and other environments may be targeted for reduction or elimination through the use of the compositions and methods of the present invention. In some embodiments, the compositions and methods of the present invention may be used to selectively target and eliminate (in whole or in part) only those cells of a given bacterial strain or species that harbor certain targeted sequences, whether those sequences are present in the bacterial chromosomal genome, in plasmids, in viruses or phages that have infected or are otherwise present in the bacteria, or in other DNA-containing components found in those bacterial cells.

### V. Enrichment of Cell Types

[0059] The compositions and methods of the present invention may be used to reduce or eliminate the presence of cells that comprise undesirable DNA sequence(s). In some embodiments, the compositions and methods of the present invention may be used to enrich for cells, cell lines, cell types, or other groupings of cells that do not comprise undesirable DNA sequence(s). Enrichment of certain cell types may be desirable, for example, following genome editing experiments or other experiments designed to modify certain known regions of a genome or other DNA molecule. In such embodiments, the genome editing experiment may be performed to produce a desired genomic modification, resulting in a pool of cells in which a portion of the cells remain wild-type while a portion of the cells comprises the desired DNA sequence modification(s). The compositions and methods of the present invention may be used to target, through the appropriate design of guide RNA(s) or other guide polynucleotides designed to hybridize with wild-type, but not with modified sequences. Introduction of a Cms1 polypeptide, or encoding polynucleotide, along with one or more appropriately designed guide RNA(s) or encoding DNA molecules, into the pool of cells (for example through the use of engineered phages or phagemids, or through the use of conjugative plasmids), results in an initial hybridization event in cells that retain the undesirable wild-type sequence(s). This initial hybridization event triggers secondary, collateral activity of the Cms1 enzyme targeted against dsDNA and/or RNA, resulting in cell death among those cells that comprise the undesirable wild-type sequence(s). The result of the targeted elimination of wild-type cells is the enrichment of cells in the cell pool that comprise the desired DNA sequence(s). Such experiments may be used, for example, to increase the likelihood of identifying and recovering cells that comprise a desirable allele or other genetic sequence, particularly in cases when such a desirable allele is relatively rare among the cells in the cell pool prior to introduction of the Cms1 polypeptide and guide RNA(s) or guide polynucleotides.

[0060] All publications and patent applications mentioned in the specification are indicative of the level of skill of those skilled in the art to which this invention pertains. All publications and patent applications are herein incorporated by reference to the same extent as if each individual publication or patent application was specifically and individually indicated to be incorporated by reference.

[0061] Although the foregoing invention has been described in some detail by way of illustration and example for purposes of clarity of understanding, it will be obvious that certain changes and modifications may be practiced within the scope of the appended claims.

Embodiments of the invention include:
1. A composition comprising:

[0062] (i) a Cms1 polypeptide, or a polynucleotide encoding a Cms1 polypeptide, and

[0063] (ii) a guide polynucleotide, or a polynucleotide encoding a guide polynucleotide,

wherein said guide polynucleotide is designed to interact, and capable of interacting, with a Cms1 polypeptide and to hybridize with a targeted sequence in one or more bacterial cells of interest, wherein said targeted sequence is located immediately downstream of a PAM sequence that is recognized by said Cms1 polypeptide.
2. The composition of embodiment 1, wherein said Cms1 polypeptide shares at least 80% identity with a sequence selected from the group consisting of SEQ ID NOs:41-160 and 340-341, or is encoded by a polynucleotide that shares at least 80% identity with a sequence selected from the group consisting of SEQ ID NOs:161-317 and 342-343 and wherein said guide polynucleotide is designed to interact with a Cms1 polypeptide and to hybridize with a targeted sequence in one or more bacterial cells, wherein said targeted sequence is located immediately downstream of a PAM sequence that is recognized by said Cms1 polypeptide.
3. The composition of embodiment 1, wherein said Cms1 polypeptide comprises a sequence selected from the group consisting of SEQ ID NOs:41-160 and 340-341, or is encoded by a polynucleotide that comprises a sequence selected from the group consisting of SEQ ID NOs: 161-317 and 342-343.
4. The composition of embodiment 1, wherein said one or more bacterial cells is a pathogenic bacterial species.
5. The composition of embodiment 4, wherein said one or more bacterial cells is a pathogenic bacterial species associated with plants.
6. The composition of embodiment 4, wherein said one or more bacterial cells is a pathogenic bacterial species associated with mammals.
7. The composition of embodiment 6, wherein said one or more bacterial cells is a pathogenic bacterial species associated with humans.
8. The composition of embodiment 1, wherein said one or more bacterial cells is a cell of a bacterial species selected from the group consisting of Xanthomonas sp., Escherichia sp., Pseudomonas sp., Erwinia sp., Xylella sp., Clavibacter sp., Ralstonia sp., Pectobacterium sp., Streptomyces sp., Burkholderia sp., Phytoplasma sp., Acidovorax sp., Pantoea sp., Agrobacterium sp., Spiroplasma sp., Candidatus Liberibacter sp., Dickeya sp., Serratia sp., Sphingomonas sp., Rhizobacter sp., Rhizomonas sp., Xylophilus sp., Rickettsia sp., Bacillus sp., Clostridium sp., Arthrobacter sp., Curtobacterium sp., Leifsonia sp., Rhodococcus sp., Phytoplasma sp., Enterobacter sp., Citrobacter sp., Klebsiella sp., Hafnia sp., Corynebacterium sp., Mycoplasma sp., Serratia sp., Pasteurella sp., Proteus sp., Campylobacter sp., Salmonella sp., Pseudomonas sp., Brucella sp., Staphylococcus sp., Streptococcus sp., Trueperella sp., Clostridium sp., Listeria sp., Anthrax sp., Bartonella sp., Capnocytophaga sp., Streptobacillus sp., Rickettsia sp., Anaplasma sp., Shigella sp., Borrelia sp., Actinomyces sp., Bacteroides sp., Bordetella sp., Chlamydia sp., Chlamydophila sp., Ehrlichia sp., Enterococcus sp., Francisella sp., Haemophilus sp., Helicobacter sp., Klebsiella sp., Legionella sp., Leptospira sp., Mycobacterium sp., Neisseria sp., Nocardia sp., Treponema sp., Vibrio sp., Yersinia sp., Coxiella sp., Wolbachia sp., Liberibacter sp., Aeromonas sp., Edwardsiella sp., Flavobacterium sp., Tenacibaculum sp., Renibacterium sp., Piscirickettsia sp., Enterobacterium sp., Lactococcus sp., Aerococcus sp., and Hepatobacter sp.
9. The composition of embodiment 1 wherein said guide polynucleotide is a guide RNA.
10. A method of killing one or more bacterial cells comprising introducing the composition of embodiment 1 into said one or more bacterial cells. The method of killing wherein said killing comprises a 5%, 10%, 15%, 20%, 25%, 30%, 50%, 75%, 80%, 85%, 90%, 95%, 96%, 97%, 98%, 99%, 100% or 5-20%, 25-50%, 50-60%, 60-75%, 50-80%, 80-90%, 80-95%, 80-99%, 90-95%, 90-99%, or more decrease in the viable bacterial population.
11. The method of embodiment 10, wherein said introducing comprises contacting said one or more bacterial cells with a phage or a phagemid engineered to comprise:

[0064] (i) a polynucleotide encoding a Cms1 polypeptide, and

[0065] (ii) a polynucleotide encoding a guide polynucleotide,

wherein said polynucleotide encoding a Cms1 polypeptide shares at least 80% identity with a sequence selected from the group consisting of SEQ ID NOs: 161-317 and 342-343, or encodes a polypeptide that shares at least 80% identity with a sequence selected from the group consisting of SEQ ID NOs:41-160 and 340-341, and wherein said guide polynucleotide is designed to interact with a Cms1 polypeptide and to hybridize with a targeted sequence in said one or more bacterial cells, wherein said targeted sequence is located immediately downstream of a PAM sequence that is recognized by said Cms1 polypeptide.
12. The method of embodiment 10 wherein said introducing comprises contacting said one or more bacterial cells with a phage or a phagemid engineered to comprise:

[0066] (i) a polynucleotide encoding a Cms1 polypeptide, and

[0067] (ii) a polynucleotide encoding a guide polynucleotide,

wherein said polynucleotide encoding a Cms1 polypeptide comprises a sequence selected from the group consisting of SEQ ID NOs: 161-317 and 342-343, or encodes a polypeptide that comprises a sequence selected from the group consisting of SEQ ID NOs:41-160 and 340-341, and wherein said guide polynucleotide is designed to hybridize with a Cms1 polypeptide and to hybridize with a targeted sequence in said one or more bacterial cells, wherein said targeted sequence is located immediately downstream of a PAM sequence that is recognized by said Cms1 polypeptide.
13. The composition of embodiment 1 wherein said composition comprises an engineered phage or phagemid.
14. The composition of embodiment 1 wherein said polynucleotide encoding a Cms1 polypeptide and said polynucleotide encoding a guide polynucleotide are part of the same polynucleotide.
15. The composition of embodiment 13 or embodiment 14 wherein said engineered phage or phagemid is derived from a phage selected from the group consisting of M13, lambda, p22, T7, Mu, T4 phage, PBSX, PlPuna-like, P2, 13, Bcep 1, Bcep 43, Bcep 78, T5 phage, phi, C2, L5, HK97, N15, T3 phage, P37, MS2, Q.beta., or Phi X 174, T2 phage, T12 phage, R17 phage, M13 phage, G4 phage, Enterobacteria phage P2, P4 phage, N4 phage, Pseudomonas phage .PHI.6, .PHI.29 phage and 186 phage.
16. The method of embodiment 10, wherein said one or more bacterial cells is a pathogenic bacterial species.
17. The method of embodiment 16, wherein said one or more bacterial cells is a pathogenic bacterial species associated with plants.
18. The method of embodiment 16, wherein said one or more bacterial cells is a pathogenic bacterial species associated with mammals.
19. The method of embodiment 18, wherein said one or more bacterial cells is a pathogenic bacterial species associated with humans.
20. The method of embodiment 10 wherein said one or more bacterial cells is a cell of a bacterial species selected from the group consisting of Xanthomonas sp., Escherichia sp., Pseudomonas sp., Envinia sp., Xylella sp., Clavibacter sp., Ralstonia sp., Pectobacterium sp., Streptomyces sp., Burkholderia sp., Phytoplasma sp., Acidovorax sp., Pantoea sp., Agrobacterium sp., Spiroplasma sp., Candidatus Liberibacter sp., Dickeya sp., Serratia sp., Sphingomonas sp., Rhizobacter sp., Rhizomonas sp., Xylophilus sp., Rickettsia sp., Bacillus sp., Clostridium sp., Arthrobacter sp., Curtobacterium sp., Leifsonia sp., Rhodococcus sp., Phytoplasma sp., Enterobacter sp., Citrobacter sp., Klebsiella sp., Hafnia sp., Corynebacterium sp., Mycoplasma sp., Serratia sp., Pasteurella sp., Proteus sp., Campylobacter sp., Salmonella sp., Pseudomonas sp., Brucella sp., Staphylococcus sp., Streptococcus sp., Trueperella sp., Clostridium sp., Listeria sp., Anthrax sp., Bartonella sp., Capnocytophaga sp., Streptobacillus sp., Rickettsia sp., Anaplasma sp., Shigella sp., Borrelia sp., Actinomyces sp., Bacteroides sp., Bordetella sp., Chlamydia sp., Chlamydophila sp., Ehrlichia sp., Enterococcus sp., Francisella sp., Haemophilus sp., Helicobacter sp., Klebsiella sp., Legionella sp., Leptospira sp., Mycobacterium sp., Neisseria sp., Nocardia sp., Treponema sp., Vibrio sp., Yersinia sp., Coxiella sp., Wolbachia sp., Liberibacter sp., Aeromonas sp., Edwardsiella sp., Flavobacterium sp., Tenacibaculum sp., Renibacterium sp., Piscirickettsia sp., Enterobacterium sp., Lactococcus sp., Aerococcus sp., and Hepatobacter sp.
21. The method of embodiment 11 wherein said phage or a phagemid is derived from a phage selected from the group consisting of M13, lambda, p22, T7, Mu, T4 phage, PBSX, P1Puna-like, P2, 13, Bcep 1, Bcep 43, Bcep 78, T5 phage, phi, C2, L5, HK97, N15, T3 phage, P37, MS2, Q.beta., or Phi X 174, T2 phage, T12 phage, R17 phage, M13 phage, G4 phage, Enterobacteria phage P2, P4 phage, N4 phage, Pseudomonas phage .PHI.6, .PHI.29 phage and 186 phage.
22. The method of embodiment 11 wherein said guide polynucleotide is a guide RNA.
23. The composition of embodiment 1 wherein said PAM sequence that is recognized by said Cms1 polypeptide is selected from the group consisting of NACTV, NATVR, BATCC, YATGC, NATTN, NCCTR, NCTMR, VCTCC, NCTKV, NGCTR, KGCTC, NGTRR, NGTCV, TGTGC, NGTTN, ATARG, RTACR, NTATV, HTCAR, ATCAC, RTCSV, YTCGA, VTCTN, TTCTR, NTGTV, ATTAT, DTTCN, CTTCK, NTTRV, ATTGT, and NTTTN.
24. The method of embodiment 11 wherein said PAM sequence that is recognized by said Cms1 polypeptide is selected from the group consisting of NACTV, NATVR, BATCC, YATGC, NATTN, NCCTR, NCTMR, VCTCC, NCTKV, NGCTR, KGCTC, NGTRR, NGTCV, TGTGC, NGTTN, ATARG, RTACR, NTATV, HTCAR, ATCAC, RTCSV, YTCGA, VTCTN, TTCTR, NTGTV, ATTAT, DTTCN, CTTCK, NTTRV, ATTGT, and NTTTN.
25. The composition of embodiment 1 wherein said polynucleotide encoding a Cms1 polypeptide and said polynucleotide encoding a guide polynucleotide are part of a vector.
26. The composition of embodiment 25 wherein said vector is selected from the group consisting of phages, phagemids, and conjugative plasmids.
27. The composition of embodiment 1 wherein said Cms1 polypeptide comprises one or more amino acid motifs selected from the group consisting of SEQ ID NOs:1-34.

[0068] The following examples are offered by way of illustration and not by way of limitation.

### EXPERIMENTAL

### Example 1—Design of E. coli Transformation Vectors

[0069] A PAM plasmid library was generated by PCR-amplifying the targeted plasmid backbone pOD7 (SEQ ID NO:329) using primers Odpr0023_Cms1_PAM_F and Odpr0024_Cms1_R (Table 1). The forward primer was synthetized to contain 5-nucleotide-long NNNNN adapters at the 5′ end comprising 1,024 possible nucleotide combinations. The linear PCR products obtained with these primers were ligated to create a plasmid library. The ligation reactions were cleaned by ethanol precipitation and electroporated into E. coli TOP10 cells. Electroporation efficiency was verified by plating. The number of transformed cells exceeded the number of possible PAM combinations by approximately 2,500-fold. The recovered transformants were grown overnight with antibiotic selection (kanamycin) in 100 mL LB medium and harvested by centrifugation (4,000 g for 30 minutes). The targeted PAM plasmid library was purified from the pellet using MIDI Kit (Zymo Research, D4201) and cleaned by ethanol precipitation. The presence of every nucleotide in each PAM position was roughly verified via Sanger sequencing.

TABLE 1
Primers used for plasmid generation

| Primer Name | Sequence |
|---|---|
| Odpr0023_Cms1_PAM_F (SEQ ID NO: 330) | NNNNNGGTGAGTTCTTCTTGTTGTTCCT |
| Odpr0024_Cms1_R (SEQ ID NO: 331) | TGGAGCAACACCTGAAGGAAG |
| ODpr0055_PAM_Illumina_F (SEQ ID NO: 332) | TCGTCGGCAGCGTCAGATGTGTATAAGAGACAGatgaccactgtggcatcg |
| ODpr0056_PAM_Illumina_R (SEQ ID NO: 333) | GTCTCGTGGGCTCGGAGATGTGTATAAGAGACAGaagaatcgccaaacaac |
| | aacaa |
| ODpr0058_i5_501_F (SEQ ID NO: 334) | AATGATACGGCGACCACCGAGATCTACACtagatcgcTCGTCGGCAGCGTC |
| ODpr0059_i5_502_F (SEQ ID NO: 335) | AATGATACGGCGACCACCGAGATCTACACctctctatTCGTCGGCAGCGTC |
| ODpr0060_i7_707_R (SEQ ID NO: 336) | CAAGCAGAAGACGGCATACGAGATgtagagagGTCTCGTGGGCTCGG |
| ODpr0061_i7_708_R (SEQ ID NO: 337) | CAAGCAGAAGACGGCATACGAGATcctctctgGTCTCGTGGGCTCGG |

### Example 2—Plasmid Clearance Assays for PAM Requirement Determination

[0070] For the PAM assay, the targeted PAM plasmid library was electroporated into E. coli BL21-AI with the targeting plasmid pOD4 (SEQ ID NO:338), comprising a gene encoding the SulfCms1 nuclease as well as a crRNA designed to hybridize with the target in the PAM plasmid library. Before these cells were made electrocompetent, expression of the nuclease and the crRNA from the separate T7 promoters was induced using arabinose and IPTG. As a control reaction, a plasmid containing the SulfCms1 nuclease but no repeat-spacer sequence (pOD49 (SEQ ID NO:339)) was used. Electroporation efficiency was verified by plating. The number of transformed cells exceeded the number of possible PAM combinations by approximately 1,700 and 11,340-fold for the targeting treatment compared to the control, respectively. Plasmid DNA was purified from the overnight cultures. The plasmid locus containing the PAMs was PCR amplified using primers ODpr0055_PAM_Illumina_F and ODpr0056_PAM_Illumina_R. The PCR products were cleaned up with AMPure beads (Beckman Coulter, A63882). The cleaned PCR products were indexed for primers having the sequences described by SEQ ID NOs:334-337 (Table 1) and cleaned once more using the AMPure beads. The final DNA amount in the resulting PCR reactions was quantified using DeNovix dsDNA Broad Range Kit (DeNovix), pooled, and sent for sequencing on the Illumina MiSeq paired-end 300 platform. The sequence data was analyzed as described previously (Leenay et al (2016) Mol Cell 62:137-147). Two biological replicates per treatment were sequenced. The sequencing data showed that SulfCms1 efficiently recognized a variety of PAM sites. These PAM sites are summarized in Table 2.

TABLE 2
PAM sites recognized by SulfCms1

| | | |
|---|---|---|
| NACTV | KGCTC | RTCSV |
| NATVR | NGTRR | YTCGA |
| BATCC | NGTCV | VTCTN |
| YATGC | TGTGC | TTCTR |
| NATTN | NGTTN | NTGTV |
| NCCTR | ATARG | ATTAT |
| NCTMR | RTACR | DTTCN |
| VCTCC | NTATV | CTTCK |
| NCTKV | HTCAR | NTTRV |
| NGCTR | ATCAC | ATTGT |
| | | NTTTN |

[0071] The PAM sites listed in Table 2 that are recognized by SulfCms1 represent 288 of the 1,024 PAM sequences in the five base pair PAM library.

[0072] To validate the results of the PAM library screen, individual PAM sequences were tested in the same co-transformation screen to test whether the PAM sites could be efficiently recognized by SulfCms1. These individual assays confirmed the results of the library screen. In individual plasmid clearance assays, plasmids with CTTTC, CGCTG, CCTTC, CCTCC, CAATC, and CTGAA PAM sites were efficiently cleared, while plasmids with CAGCG and CTGGT PAM sites were not efficiently cleared.

[0073] In addition to SulfCms1, additional Cms1 enzymes were tested in these E. coli plasmid clearance assays. Table 3 summarizes the results of these plasmid clearance assays.

TABLE 3
Plasmid clearance assay results

| | SEQ ID | log |
|---|---|---|
| nuclease | NO | clearance |
| Pb2Cpf1 | 324 | 3.45 |
| Sulf | 42 | 3.27 |
| Sulf | 42 | 3.87 |
| Sulf | 42 | 2.92 |
| Sulf | 42 | 2.78 |
| Sulf | 42 | 3.12 |
| Unk34 | 82 | 3.94 |
| Unk7 | 57 | 3.24 |
| Unk7 | 57 | 2.92 |
| Unk35 | 83 | 1.87 |
| Unk35 | 83 | 1.72 |
| Unk37 | 85 | 1.57 |
| Unk33 | 81 | 1.45 |
| Unkll | 61 | 1.24 |
| Unk25 | 73 | 0.79 |
| Unkl9 | 67 | 0.65 |
| Unkl5 | 63 | 0.60 |
| Unk24 | 72 | 0.34 |
| Unk26 | 74 | 0.26 |
| Unk9 | 59 | 0.24 |
| Unk3 | 53 | 0.19 |
| Unk21 | 69 | 0.15 |
| Unk27 | 75 | 0.11 |
| Unk4 | 54 | 0.10 |
| Unk6 | 56 | 0.07 |
| Unk2 | 52 | 0.06 |
| Unkl7 | 65 | 0.06 |
| Unk41 | 89 | −0.08 |
| Unk5 | 55 | −0.10 |
| Unk40 | 88 | −0.13 |
| Unkl4 | 62 | −0.15 |
| Unkl6 | 64 | −0.22 |

[0074] The data in Table 3 show that many of the Cms1 nucleases tested in the E. coli plasmid clearance assay resulted in substantial plasmid clearance, leading to cell death in these assays.

### Example 3—Positive Selection Assays in E. coli

[0075] SulfCms1 was used in a positive selection assay in E. coli. In these assays, the guide RNA associated with SulfCms1 was designed to hybridize with a sequence in the ileS gene present in the 133908 plasmid (SEQ ID NO:318), which also comprised an arabinose/IPTG-inducible ccdB toxin gene. The ileS gene present in the 133908 plasmid comprised four base changes relative to the ileS gene present in the E. coli chromosome. Disruption of the 133908 plasmid was expected to result in cell survival in these assays by preventing the expression of the ccdB gene following induction by arabinose and IPTG.

[0076] C173 E. coli cells comprising the 133908 plasmid were grown overnight at 37° C. in liquid LB medium comprising 50 μg/mL kanamycin. Following overnight growth, three replicate 5 mL cultures of LB medium comprising 50 μg/mL kanamycin were each inoculated with 100 μL of the overnight culture. These 5 mL cultures were grown for four hours at 37° C. to an OD₆₀₀ₙₘ of approximately 0.6. These cell cultures were then centrifuged at 5,000 rpm for five minutes at room temperature to pellet the cells, after which the supernatant was discarded. The cell pellets were then combined in 1 mL of molecular biology-grade water (dH₂O) and transferred to a 1.7 mL microcentrifuge tube. The cells were pelleted and washed twice, with pelleting accomplished by spinning at 9,000 rpm for one minute followed by a wash in 1 mL dH₂O. The washed cell pellets were then resuspended in 262.5 μL dH₂O, and 50 μL aliquots were prepared for transformation. The cells were transformed via electroporation with 100 ng of plasmid 133956 (SEQ ID NO:319) or 134136 (SEQ ID NO:320), each comprising a chloramphenicol resistance gene and designed to express SulfCms1, along with a guide RNA designed to hybridize with the iles target (134136) or a negative control guide RNA designed to target a sequence not present in these experiments (133956). Duplicate transformations were performed with each plasmid. The cells were allowed to recover in 5004, of SOC medium by shaking for one hour at 37° C. Following recovery, 1004, of log-dilutions from 10° to 10′ were plated on LB agar plates comprising chloramphenicol and allowed to grow overnight at 37° C. CFU (colony forming units) were counted the following day. Table 4 shows the number of colonies obtained from each dilution in this experiment, with each replicate on a separate row:

TABLE 4
CFU observed following ileS-targeting positive selection results

| | Nuclease/ | | | | |
|---|---|---|---|---|---|
| Target | Guide | 10⁰ | 10⁻¹ | 10⁻² | 10⁻³ |
| Plasmid | Plasmid | Dilution | Dilution | Dilution | Dilution |
| 133908 | 133956 | Lawn | Too many | 164 | 15 |
| | | | to count | | |
| | | Lawn | Too many | 254 | 23 |
| | | | to count | | |
| | 134136 | 2 | 1 | 0 | 0 |
| | | 11 | 0 | 0 | 0 |

[0077] As Table 4 shows, transformation with the 133956 plasmid, as expected, had no apparent effect on the cells, with many colonies surviving (ccdB gene expression was not activated in this experiment because no arabinose or IPTG was included in the cell growth media). Unexpectedly, however, transformation with the 134136 plasmid led to cell death, with few cells surviving. Because the results from the experiment summarized in Table 4 were unexpected, a follow-up experiment was performed using the same protocol with minor changes: the target plasmid used in these experiments was 133870 (SEQ ID NO:321), which comprised the same ileS target found in the 133908 plasmid, but did not include a ccdB toxin gene to avoid any complications caused by the possibility of leaky ccdB expression even in the absence of arabinose or IPTG, and an additional nuclease and guide plasmid was used in this experiment. Nuclease/guide plasmid 133938 (SEQ ID NO:322) was identical to 134136 except that the encoded nuclease was Pb2Cpf1 (SEQ ID NO:324, encoded by SEQ ID NO:323) rather than SulfCms1. Table 5 summarizes the results of these experiments.

TABLE 5
CFU observed following ileS-targeting positive selection.

| | Nuclease/ | | | | |
|---|---|---|---|---|---|
| Target | Guide | 10⁰ | 10⁻¹ | 10⁻² | 10⁻³ |
| Plasmid | Plasmid | Dilution | Dilution | Dilution | Dilution |
| 133870 | 133956 | Lawn | Lawn | Too Many | 283 |
| | | | | to Count | |
| | | Lawn | Lawn | Too Many | 242 |
| | | | | to Count | |
| | 134136 | 173 | 23 | 2 | 0 |
| | | 179 | 16 | 0 | 0 |
| | 133938 | Lawn | Lawn | Too Many | 162 |
| | | | | to Count | |
| | | Lawn | Lawn | Too Many | 168 |
| | | | | to Count | |

[0078] Consistent with the results shown in Table 4, the results in Table 5 showed that E. coli transformation with 134136, expressing SulfCms1 with a plasmid-targeting guide RNA, resulted in cell death while transformation with 133956 comprising a non-targeting guide RNA did not result in cell death. Transformation with the 133938 plasmid, expressing Pb2Cpf1, did not result in cell death.

[0079] These assays were again repeated with target plasmids 133137 (SEQ ID NO:325) and 133167 (SEQ ID NO:326). Plasmid 133137 comprises a target sequence downstream from a TTTC PAM site that is efficiently recognized by SulfCms1, while 133167 comprises the same target sequence downstream from a TGGT PAM site that is not efficiently recognized by SulfCms1. Both of these target plasmids comprise a target that was not derived from an E. coli chromosomal target that would be a likely off-target based on off-target effects observed in other CRISPR nuclease systems. Table 6 summarizes the results of these experiments.

TABLE 6
CFU observed with targeted vs. Non-Targeted PAM sequence

| | Nuclease/ | | | | |
|---|---|---|---|---|---|
| Target | Guide | 10⁰ | 10⁻¹ | 10⁻² | 10⁻³ |
| Plasmid | Plasmid | Dilution | Dilution | Dilution | Dilution |
| 133167 | 133956 | Too Many | 80 | 4 | 0 |
| | | to Count | | | |
| | | Too Many | 108 | 8 | 0 |
| | | to Count | | | |
| | 134136 | Too Many | 90 | 4 | 0 |
| | | to Count | | | |
| | | Too Many | 129 | 7 | 0 |
| | | to Count | | | |
| 133137 | 133956 | 2 | 0 | 0 | 0 |
| | | 9 | 1 | 0 | 0 |
| | 134136 | Too Many | 110 | 12 | 0 |
| | | to Count | | | |
| | | Too Many | 60 | 4 | 0 |
| | | to Count | | | |

[0080] The results summarized in Table 6 show that cell death results when SulfCms1 was expressed with a guide RNA designed to hybridize with a target sequence present in a plasmid, but only when the target sequence was located downstream from a PAM sequence that is recognized by SulfCms1. Because the target sequences present in these plasmids do not have corresponding E. coli chromosomal targets, it was concluded that the observed cell death was unlikely a result of “off-target effects” known to result when a CRISPR nuclease complex hybridizes with a target sequence that imperfectly base pairs with the associated guide RNA. Instead, it was hypothesized that a different mechanism was responsible for the cell death.

[0081] These assays were repeated with target plasmid 133870 and several nuclease/guide plasmid variations. In addition to plasmids 133956 and 134136, described above, plasmids 134396 (SEQ ID NO:328) and 134395 (SEQ ID NO:327) were also used. The 134396 plasmid comprises a disrupted SulfCms1 coding sequence encoding a non-functional SulfCms1 protein comprising only 48 amino acids. The 134395 plasmid comprises a RuvCI mutant SulfCms1 coding sequence comprising a D to A mutation in the RuvCI catalytic residue. Table 7 summarizes the results of these experiments.

TABLE 7
CFU observed with functional vs. Non-Functional SulfCmsl

| | Nuclease/ | | | | |
|---|---|---|---|---|---|
| Target | Guide | 10⁰ | 10⁻¹ | 10⁻² | 10⁻³ |
| Plasmid | Plasmid | Dilution | Dilution | Dilution | Dilution |
| 133870 | 133956 | Lawn | Too Many | 139 | 20 |
| | | | to Count | | |
| | | Lawn | Too Many | 222 | 29 |
| | | | to Count | | |
| | | Lawn | Too Many | 144 | 17 |
| | | | to Count | | |
| | | Lawn | 264 | 66 | 5 |
| | 134396 | Lawn | Too Many | 61 | 8 |
| | | | to Count | | |
| | | Lawn | Too Many | 221 | 29 |
| | | | to Count | | |
| | 134136 | 13 | 0 | 0 | 0 |
| | | 1 | 0 | 0 | 0 |
| | | 3 | 0 | 0 | 0 |
| | | 1 | 0 | 0 | 0 |
| | 134395 | Lawn | Too Many | 140 | 21 |
| | | | to Count | | |
| | | Lawn | Too Many | 231 | 30 |
| | | | to Count | | |

[0082] The results in Table 7 show that cell death resulted when a functional SulfCms1 protein was present with a guide RNA designed to hybridize with a target sequence, but not when a non-functional protein (134396 plasmid) or a RuvCI mutant SulfCms1 protein (134395 plasmid) were present.

[0083] The results summarized in Tables 4 through 7 collectively show that SulfCms1, but not Pb2Cpf1, effectively kills E. coli cells in a sequence specific manner that is not consistent with “off-target effects” that are known to occur with CRISPR nucleases. Importantly, cell death resulted even when non-essential genes on plasmids were targeted by SulfCms1, and resulted only when a functional SulfCms1 protein comprising a functional RuvC domain was present and when a PAM sequence recognized by SulfCms1 was present upstream of the targeted sequence.

### Example 4—Phagemid-Encoded Cms1 Cell Killing

[0084] Genes encoding SulfCms1 (SEQ ID NO:42, encoded by SEQ ID NO:348) and LbCpf1 (SEQ ID NO:349, encoded by SEQ ID NO:350) were cloned into a modified pBAD24 plasmid vector backbone; the ampicillin resistance gene in pBAD24 for these nuclease plasmids was replaced by a chloramphenicol resistance cassette. The PJ23105 promoter (SEQ ID NO:351) was used to drive expression of the nuclease in these nuclease plasmids. The full sequences of the SulfCms1 (pOD786) and LbCpf1 (pOD818) plasmids are SEQ ID NOs: 352 and 353, respectively. The pOD789 (SEQ ID NO:346) and pOD821 (SEQ ID NO:347) target plasmids were generated in a pBAD24 plasmid backbone comprising an ampicillin resistance cassette. The pOD789 plasmid was used as a non-targeting control as the target was located downstream from a TAGAT PAM site that is not accessible by SuCms1 or LbCpf1, while the pOD821 comprised the same target sequence downstream from a ACTTA PAM site that is accessible by these nucleases. Both the pOD789 and pOD821 plasmids also comprised an identical guide RNA (SEQ ID NO:344), expressed from a synthetic promoter (SEQ ID NO:345) and designed to hybridize with the target sequence.

[0085] For preparation of phage particles comprising the nuclease and guide RNA cassettes, E. coli cells of the ER2738 strain were transformed with the relevant nuclease plasmids described above (i.e., pOD786 or pOD818) and grown in LB medium supplemented with chloramphenicol. M13K07 (New England Biolabs) helper phage was added and following a one-hour incubation, kanamycin was added to the medium. Cells were harvested to collect the packaged phage comprising the appropriate nuclease cassette and the phage were then appropriately diluted.

[0086] To test the ability of SuCms1 to mediate cell killing when expressed from a phage, E. coli cells of the EMG2 strain were transformed with either pOD789 (non-target plasmid) or pOD821 (target plasmid) and grown in LB medium supplemented with ampicillin. Cells were collected at an OD600 of approximately 0.8 and resuspended to 10⁸ CFU/mL. Appropriately diluted phage was added to this cell resuspension and incubated for 30 minutes at room temperature before the addition of the appropriate antibiotics. Chloramphenicol was added to select only for the nuclease, or a combination of chloramphenicol and ampicillin was added to select for both the nuclease and target plasmid.

[0087] Table 8 shows the number of CFUs following phage infection with phage derived from pOD786 or pOD818 in cells harboring either the pOD789 or pOD821 plasmid, then plated on LB medium comprising either chloramphenicol or a combination of chloramphenicol and ampicillin.

TABLE 8
CFU observed following phage infection

| | | | Chloramphenicol + | |
|---|---|---|---|---|
| | Chloramphenicol | | Ampicillin | |
| Phagemid | pOD789 | pOD821 | pOD789 | pOD821 |
| pOD786 | 101000 ± 11690 | 6175 ± 634 | 94500 ± 5745 | 4850 ± 436 |
| pOD818 | 109250 ± 20172 | 124750 ± 9069 | 128750 ± 7676 | 57.5 ± 38 |

[0088] The data in table 8 show that pOD786, comprising a gene encoding SulfCms1, results in robust cell death when the cells are plated on either chloramphenicol or a combination of chloramphenicol and ampicillin, while pOD818, comprising a gene encoding LbCpf1, results in robust cell death only when plated on a combination of chloramphenicol and ampicillin. Thus, similar to the results of the plasmid assays described above, SulfCms1 can mediate robust cell death following targeting of a plasmid even when that plasmid is not selected for via antibiotics, while LbCpf1 mediates cell death following plasmid targeting only when the targeted plasmid comprises an antibiotic resistance gene that is selected for.

### Example 5—Sequence Analyses of Cms1 Nucleases

[0089] Cms1 nuclease amino acid sequence alignments were examined to identify motifs within the protein sequences that are well-conserved among these nucleases. It was observed that Cms1 nucleases were found in three fairly well-separated clades on the phylogenetic tree shown in FIG. 1. One of these clades includes SmCms1 (SEQ ID NO:41), another includes SulfCms1 (SEQ ID NO:42), and another includes Unk40Cms1 (SEQ ID NO:88). Members of each of these clades were therefore aligned separately to identify partially and/or completely conserved amino acid motifs among these nucleases. SmCms1-like nucleases include those proteins listed in the group consisting of SEQ ID NOs:41, 43-46, 49-51, 53-55, 58-60, 63, 64, 66-80, 87, 90-95, 97, 100, 101, 105, 107, 108, 112, 114, 116, 119, 121, 122, 124-128, 131-133, 138-141, 143, 145, 146-148, 151-160, and 340-341. SulfCms1-like nucleases include those proteins listed in the group consisting of SEQ ID NOs:42, 47, 48, 52, 56, 57, 61, 62, 65, 81-86, 89, 99, 102, 103, 106, 110, 111, 113, 115, 118, 135-137, 142, 144, 149, and 150. Unk40Cms1-like nucleases include those proteins listed in the group consisting of SEQ ID NOs:88, 96, 98, 104, 109, 117, 120, 123, 129, 130, and 134. The amino acid motifs shown in SEQ ID NOs:1-10 were identified from the alignment of SmCms1-like nucleases; the amino acid motifs shown in SEQ ID NOs:11-27 were identified from the alignment of SulfCms1-like nucleases; the amino acid motifs shown in SEQ ID NOs:28-34 were identified from the alignment of Unk40Cms1-like nucleases. Weblogos were created using the sequence alignments and are depicted graphically in FIGS. 2-4 (SmCms1-like, SulfCms1-like, and Unk40Cms1-like sequence motifs, respectively; weblogo.berkeley.edu) along with schematic diagrams showing the locations of these conserved motifs on the SmCms1, SulfCms1, and Unk40Cms1 protein sequences.

The application's sequence listing, which the Patent Office published only in electronic form, follows.

SEQUENCE LISTING (353 sequences)

SEQ ID NO: 1 - protein, 9 aa, unknown
  conserved motif
  MISC_FEATURE (1)..(9): conserved motif; X1=S/T; X2=F/L; X3=N/S; X4=Y/F/R; X5=Y/F/H; X6=T/S/A; X7=I/V/L/R; X8=N/S/F/R
  MISC_FEATURE (1)..(1): X1=S/T
  MISC_FEATURE (2)..(2): X2=F/L
  MISC_FEATURE (3)..(3): X3=N/S
  MISC_FEATURE (4)..(4): X4=Y/F/R
  MISC_FEATURE (5)..(5): X5=Y/F/H
  MISC_FEATURE (6)..(6): X6=T/S/A
  MISC_FEATURE (7)..(7): X7=I/V/L/R
  MISC_FEATURE (8)..(8): X8=N/S/F/R
XXXXXXXXK

SEQ ID NO: 2 - protein, 11 aa, Unknown
  conserved motif
  MISC_FEATURE (1)..(11): conserved motif
  MISC_FEATURE (1)..(1): X1=F/Y/I/W
  MISC_FEATURE (2)..(2): X2=K/E/L/N
  MISC_FEATURE (3)..(3): X3=A/S/G/N
  MISC_FEATURE (4)..(4): X4=any amino acid
  MISC_FEATURE (5)..(5): X5=Q/A/E/K/R
  MISC_FEATURE (7)..(8): X=any amino acid
  MISC_FEATURE (9)..(9): X=F/L/Y
  MISC_FEATURE (10)..(10): X=any amino acid
  MISC_FEATURE (11)..(11): X=E/Q/K/S/D
XXXXXKXXXXX

SEQ ID NO: 3 - protein, 14 aa, Unknown
  conserved motif
  MISC_FEATURE (1)..(14): conserved motif
  MISC_FEATURE (1)..(1): X=F/L/V/I
  MISC_FEATURE (2)..(2): X=E/K/N/D/S
  MISC_FEATURE (4)..(4): X=L/F/I/M
  MISC_FEATURE (6)..(6): X=L/Y/F/M
  MISC_FEATURE (7)..(7): X=R/S/K
  MISC_FEATURE (8)..(8): X=A/S
  MISC_FEATURE (9)..(9): X=L/I/F/V
  MISC_FEATURE (10)..(10): X=any amino acid
  MISC_FEATURE (13)..(13): X=C/I
  MISC_FEATURE (14)..(14): X=F/R
XXSXTXXXKXKXXX

SEQ ID NO: 4 - protein, 22 aa, Unknown
  Conserved Motif
  MISC_FEATURE (1)..(22): conserved motif
  MISC_FEATURE (2)..(3): X=any amino acid
  MISC_FEATURE (4)..(4): X=F/I/Y
  MISC_FEATURE (5)..(5): X=W/F
  MISC_FEATURE (6)..(16): X=any amino acid
  MISC_FEATURE (17)..(17): X=I/L/T/V/W
  MISC_FEATURE (18)..(18): X=R/S
  MISC_FEATURE (19)..(19): X=L/I
  MISC_FEATURE (20)..(20): X=N/T
WXXXXXXXXXXXXXXXXXXXPE

SEQ ID NO: 5 - protein, 12 aa, Unknown
  conserved motif
  MISC_FEATURE (1)..(12): conserved motif (RuvCI domain)
  MISC_FEATURE (1)..(1): X=Y/W/F
  MISC_FEATURE (2)..(2): X=any amino acid
  MISC_FEATURE (3)..(3): X=Y/F/L/I
  MISC_FEATURE (4)..(4): X=G/W
  MISC_FEATURE (5)..(5): X=I/L/V
  MISC_FEATURE (7)..(7): X=any amino acid
  MISC_FEATURE (8)..(8): X=G/N
  MISC_FEATURE (9)..(10): X=any amino acid
  MISC_FEATURE (11)..(11): X=E/D/Q
  MISC_FEATURE (12)..(12): X=L/F
XXXXXDXXXXXX

SEQ ID NO: 6 - protein, 17 aa, Unknown
  conserved motif
  MISC_FEATURE (1)..(17): conserved motif
  MISC_FEATURE (1)..(1): X=D/N
  MISC_FEATURE (2)..(2): X=L/M
  MISC_FEATURE (3)..(3): X=T/S
  MISC_FEATURE (4)..(4): X=any amino acid
  MISC_FEATURE (5)..(5): X=A/S/V
  MISC_FEATURE (7)..(7): X=L/M/V/I
  MISC_FEATURE (8)..(8): X=I/L/V/K
  MISC_FEATURE (9)..(11): X=any amino acid
  MISC_FEATURE (12)..(12): X=I/G/L
  MISC_FEATURE (13)..(13): X=I/V/Y/F
  MISC_FEATURE (14)..(14): X=any amino acid
  MISC_FEATURE (16)..(16): X=G/A/K
  MISC_FEATURE (17)..(17): X=D/G/P
XXXXXKXXXXXXXXNXX

SEQ ID NO: 7 - protein, 9 aa, Unknown
  conserved motif
  MISC_FEATURE (1)..(9): conserved motif
  MISC_FEATURE (1)..(1): X=I/L/V
  MISC_FEATURE (2)..(2): X=V/T/A/C/S
  MISC_FEATURE (3)..(3): X=A/S/G
  MISC_FEATURE (5)..(5): X=M/A/I/V
  MISC_FEATURE (6)..(6): X=V/I/T
  MISC_FEATURE (7)..(7): X=G/W
  MISC_FEATURE (8)..(8): X=V/I
  MISC_FEATURE (9)..(9): X=I/L/V
XXXNXXXXX

SEQ ID NO: 8 - protein, 10 aa, Unknown
  conserved motif
  MISC_FEATURE (1)..(10): conserved RuvCII motif
  MISC_FEATURE (1)..(2): X=any amino acid
  MISC_FEATURE (3)..(3): X=I/V/M
  MISC_FEATURE (4)..(5): X=any amino acid
  MISC_FEATURE (7)..(10): X=any amino acid
XXXXXEXXXX

SEQ ID NO: 9 - protein, 13 aa, Unknown
  conserved motif
  MISC_FEATURE (1)..(13): conserved motif
  MISC_FEATURE (3)..(9): X=any amino acid
  MISC_FEATURE (12)..(12): X=any amino acid
TSXXXXXXXCPXC

SEQ ID NO: 10 - protein, 16 aa, Unknown
  conserved motif
  MISC_FEATURE (1)..(16): conserved RuvCIII motif
  MISC_FEATURE (2)..(3): X=any amino acid
  MISC_FEATURE (5)..(5): X=A/G/T/S
  MISC_FEATURE (6)..(6): X=Y/F
  MISC_FEATURE (7)..(7): X=N/L
  MISC_FEATURE (8)..(8): X=I/V
  MISC_FEATURE (9)..(9): X=A/S/I
  MISC_FEATURE (10)..(16): X=any amino acid
DXXAXXXXXXXXXXXX

SEQ ID NO: 11 - protein, 31 aa, Unknown
  conserved motif
  MISC_FEATURE (1)..(31): conserved motif in Sulf-type Cms1 proteins
  MISC_FEATURE (2)..(4): X=any amino acid
  MISC_FEATURE (5)..(5): X=Y/F/L
  MISC_FEATURE (6)..(8): X=any amino acid
  MISC_FEATURE (9)..(9): X=D/G/N
  MISC_FEATURE (10)..(10): X=Q/L/F/M
  MISC_FEATURE (11)..(11): X=I/L/V/M
  MISC_FEATURE (12)..(12): X=any amino acid
  MISC_FEATURE (13)..(13): X=L/I/V
  MISC_FEATURE (14)..(14): X=any amino acid
  MISC_FEATURE (16)..(16): X=D/E/S
  MISC_FEATURE (17)..(17): X=Y/F
  MISC_FEATURE (19)..(19): X=K/R/L/S
  MISC_FEATURE (20)..(20): X=any amino acid
  MISC_FEATURE (21)..(21): X=L/I/M
  MISC_FEATURE (22)..(22): X=any amino acid
  MISC_FEATURE (23)..(23): X=K/R/S
  MISC_FEATURE (24)..(24): X=K/E
  MISC_FEATURE (25)..(25): X=A/I/L/V
  MISC_FEATURE (26)..(26): X=any amino acid
  MISC_FEATURE (28)..(28): X=D/E/N/V
  MISC_FEATURE (29)..(29): X=A/G/F/V
  MISC_FEATURE (30)..(30): X=F/M/I
WXXXXXXXXXXXXXKXXYXXXXXXXXFXXXW

SEQ ID NO: 12 - protein, 15 aa, Unknown
  conserved motif
  MISC_FEATURE (1)..(15): conserved motif in Sulf-type Cms1 nucleases
  MISC_FEATURE (3)..(3): X=Y/V/P
  MISC_FEATURE (4)..(4): X=K/I
  MISC_FEATURE (5)..(5): X=any amino acid
  MISC_FEATURE (6)..(6): X=I/V
  MISC_FEATURE (8)..(8): X=F/A/V/I
  MISC_FEATURE (9)..(9): X=any amino acid
  MISC_FEATURE (10)..(10): X=V/A/L
  MISC_FEATURE (11)..(13): X=any amino acid
  MISC_FEATURE (14)..(14): X=L/I/V
  MISC_FEATURE (15)..(15): X=A/V
FKXXXXPXXXXXXXX

SEQ ID NO: 13 - protein, 12 aa, Unknown
  conserved motif
  MISC_FEATURE (1)..(12): conserved motif in Sulf-type Cms1 nucleases
  MISC_FEATURE (3)..(3): X=I/L/V
  MISC_FEATURE (4)..(4): X=N/K
  MISC_FEATURE (5)..(5): X=any amino acid
  MISC_FEATURE (9)..(9): X=F/Y
  MISC_FEATURE (10)..(10): X=A/S/T
YPXXXAFDXXWE

SEQ ID NO: 14 - protein, 12 aa, Unknown
  conserved motif
  MISC_FEATURE (1)..(12): conserved motif in Sulf-type Cms1 nucleases
  MISC_FEATURE (1)..(1): X=I/L
  MISC_FEATURE (2)..(2): X=I/V
  MISC_FEATURE (5)..(7): X=any amino acid
  MISC_FEATURE (8)..(8): X=N/D
  MISC_FEATURE (9)..(9): X=R/K
  MISC_FEATURE (10)..(10): X=H/F/Y
  MISC_FEATURE (11)..(11): X=I/L/V
  MISC_FEATURE (12)..(12): X=I/L/F
XXEDXXXXXXXX

SEQ ID NO: 15 - protein, 13 aa, Unknown
  conserved motif
  MISC_FEATURE (1)..(13): conserved motif in Sulf-type Cms1 nucleases
  MISC_FEATURE (1)..(1): X=Y/C/S
  MISC_FEATURE (2)..(2): X=any amino acid
  MISC_FEATURE (3)..(3): X=I/V
  MISC_FEATURE (4)..(4): X=any amino acid
  MISC_FEATURE (6)..(6): X=F/L/I/V
  MISC_FEATURE (9)..(10): X=any amino acid
  MISC_FEATURE (11)..(11): X=L/I
  MISC_FEATURE (12)..(12): X=any amino acid
XXXXSXTSXXXXK

SEQ ID NO: 16 - protein, 14 aa, Unknown
  conserved motif
  MISC_FEATURE (1)..(14): conserved motif in Sulf-type Cms1 nucleases
  MISC_FEATURE (1)..(1): X=E/A
  MISC_FEATURE (2)..(2): X=any amino acid
  MISC_FEATURE (3)..(3): X=I/L
  MISC_FEATURE (4)..(4): X=E/K/I
  MISC_FEATURE (5)..(5): X=K/H/R
  MISC_FEATURE (7)..(7): X=I/V/L
  MISC_FEATURE (9)..(9): X=any amino acid
  MISC_FEATURE (10)..(10): X=K/N
  MISC_FEATURE (11)..(11): X=any amino acid
  MISC_FEATURE (12)..(12): X=Y/H
  MISC_FEATURE (13)..(13): X=any amino acid
  MISC_FEATURE (14)..(14): X=L/F
XXXXXEXDXXXXXX

SEQ ID NO: 17 - protein, 9 aa, Unknown
  conserved motif
  MISC_FEATURE (1)..(9): conserved motif in Sulf-type Cms1 nucleases
  MISC_FEATURE (1)..(1): X=L/S/F
  MISC_FEATURE (3)..(3): X=L/F/V
  MISC_FEATURE (5)..(5): X=I/F/L
  MISC_FEATURE (6)..(6): X=I/V
  MISC_FEATURE (8)..(8): X=Q/K
XLXPXXNXD

SEQ ID NO: 18 - protein, 9 aa, Unknown
  conserved motif
  MISC_FEATURE (1)..(9): conserved motif in Sulf-type Cms1 nucleases
  MISC_FEATURE (1)..(1): X=L/I
  MISC_FEATURE (2)..(2): X=H/T
  MISC_FEATURE (6)..(6): X=any amino acid
  MISC_FEATURE (7)..(7): X=I/V/L/M
  MISC_FEATURE (8)..(8): X=F/S/T
XXPEFXXXY

SEQ ID NO: 19 - protein, 18 aa, Unknown
  conserved motif
  MISC_FEATURE (1)..(18): conserved motif in Sulf-type Cms1 nucleases
  MISC_FEATURE (1)..(1): X=N/K
  MISC_FEATURE (3)..(3): X=Y/F
  MISC_FEATURE (4)..(4): X=S/G/W
  MISC_FEATURE (5)..(5): X=R/K/S
  MISC_FEATURE (6)..(6): X=F/L/V
  MISC_FEATURE (7)..(7): X=Q/E
  MISC_FEATURE (8)..(8): X=M/L/F/I
  MISC_FEATURE (9)..(9): X=any amino acid
  MISC_FEATURE (10)..(10): X=A/C/G
  MISC_FEATURE (11)..(11): X=any amino acid
  MISC_FEATURE (12)..(12): X=F/L/I
  MISC_FEATURE (13)..(14): X=any amino acid
  MISC_FEATURE (15)..(15): X=E/D/H
  MISC_FEATURE (16)..(16): X=F/Y/I/V
  MISC_FEATURE (17)..(17): X=I/L/V/K
  MISC_FEATURE (18)..(18): X=P/K
XRXXXXXXXXXXXXXXXX

SEQ ID NO: 20 - protein, 14 aa, Unknown
  conserved motif
  MISC_FEATURE (1)..(14): conserved motif in Sulf-type Cms1 nucleases
  MISC_FEATURE (3)..(3): X=R/S
  MISC_FEATURE (4)..(4): X=G/W
  MISC_FEATURE (5)..(5): X=I/Q/L
  MISC_FEATURE (6)..(6): X=I/L/Q
  MISC_FEATURE (7)..(7): X=K/N
  MISC_FEATURE (8)..(8): X=E/Q
  MISC_FEATURE (11)..(11): X=T/V
  MISC_FEATURE (14)..(14): X=I/L/V
GIDXXXXXLAXLCX

SEQ ID NO: 21 - protein, 11 aa, Unknown
  conserved motif
  MISC_FEATURE (1)..(11): conserved motif in Sulf-type Cms1 nucleases
  MISC_FEATURE (1)..(1): X=I/V
  MISC_FEATURE (3)..(3): X=D/N
  MISC_FEATURE (4)..(4): X=L/I
  MISC_FEATURE (5)..(5): X=S/T
  MISC_FEATURE (6)..(6): X=N/D
  MISC_FEATURE (7)..(7): X=L/I
  MISC_FEATURE (8)..(8): X=R/K
  MISC_FEATURE (9)..(9): X=V/I
  MISC_FEATURE (10)..(10): X=E/D
  MISC_FEATURE (11)..(11): X=T/S/K
XLXXXXXXXXX

SEQ ID NO: 22 - protein, 11 aa, Unknown
  conserved motif
  MISC_FEATURE (1)..(11): conserved motif in Sulf-type Cms1 nucleases
  MISC_FEATURE (1)..(1): X=L/M
  MISC_FEATURE (2)..(3): X=any amino acid
  MISC_FEATURE (4)..(4): X=L/M/Y
  MISC_FEATURE (5)..(5): X=A/S/P
  MISC_FEATURE (6)..(6): X=Y/S
  MISC_FEATURE (7)..(7): X=I/V/D
  MISC_FEATURE (8)..(8): X=R/S
  MISC_FEATURE (9)..(9): X=any amino acid
  MISC_FEATURE (10)..(10): X=L/N/V
  MISC_FEATURE (11)..(11): X=Q/T
XXXXXXXXXXX

SEQ ID NO: 23 - protein, 19 aa, Unknown
  conserved motif
  MISC_FEATURE (1)..(19): conserved motif in Sulf-type Cms1 nucleases
  MISC_FEATURE (1)..(1): X=E/Q
  MISC_FEATURE (2)..(2): X=L/M
  MISC_FEATURE (3)..(3): X=D/E/K
  MISC_FEATURE (4)..(5): X=any amino acid
  MISC_FEATURE (6)..(6): X=D/E/G
  MISC_FEATURE (7)..(7): X=any amino acid
  MISC_FEATURE (8)..(8): X=L/S
  MISC_FEATURE (10)..(10): X=any amino acid
  MISC_FEATURE (11)..(11): X=G/W/S
  MISC_FEATURE (12)..(12): X=V/I
  MISC_FEATURE (13)..(13): X=V/T
  MISC_FEATURE (14)..(14): X=A/G
  MISC_FEATURE (16)..(16): X=M/I
  MISC_FEATURE (17)..(17): X=V/I
  MISC_FEATURE (19)..(19): X=V/I
XXXXXXXXLXXXXXNXXGX

SEQ ID NO: 24 - protein, 10 aa, Unknown
  conserved motif
  MISC_FEATURE (1)..(10): conserved motif in Sulf-type Cms1 nucleases
  MISC_FEATURE (2)..(2): X=any amino acid
  MISC_FEATURE (3)..(3): X=V/A/G
  MISC_FEATURE (4)..(4): X=Y/K/R/V
  MISC_FEATURE (5)..(5): X=I/V
  MISC_FEATURE (6)..(6): X=any amino acid
  MISC_FEATURE (7)..(7): X=L/F/I
  MISC_FEATURE (9)..(9): X=D/N
  MISC_FEATURE (10)..(10): X=L/I
YXXXXXXEXX

SEQ ID NO: 25 - protein, 16 aa, Unknown
  conserved motif
  MISC_FEATURE (1)..(16): conserved motif in Sulf-type Cms1 nucleases
  MISC_FEATURE (2)..(2): X=G/W
  MISC_FEATURE (3)..(3): X=L/V
  MISC_FEATURE (4)..(4): X=G/W/E
  MISC_FEATURE (5)..(5): X=T/L
  MISC_FEATURE (6)..(6): X=Y/M
  MISC_FEATURE (7)..(7): X=any amino acid
  MISC_FEATURE (8)..(8): X=F/Y
  MISC_FEATURE (9)..(9): X=F/L/M
  MISC_FEATURE (11)..(11): X=any amino acid
  MISC_FEATURE (12)..(12): X=Q/K
  MISC_FEATURE (14)..(14): X=L/V
  MISC_FEATURE (15)..(15): X=any amino acid
AXXXXXXXXEXXLXXK

SEQ ID NO: 26 - protein, 21 aa, Unknown
  conserved motif
  MISC_FEATURE (1)..(21): conserved motif in Sulf-type Cms1 nucleases
  MISC_FEATURE (2)..(3): X=any amino acid
  MISC_FEATURE (5)..(5): X=I/V
  MISC_FEATURE (6)..(6): X=I/F/V
  MISC_FEATURE (7)..(7): X=any amino acid
  MISC_FEATURE (8)..(8): X=F/Y
  MISC_FEATURE (9)..(9): X=V/I/T
  MISC_FEATURE (10)..(10): X=any amino acid
  MISC_FEATURE (11)..(11): X=P/A
  MISC_FEATURE (12)..(13): X=any amino acid
  MISC_FEATURE (15)..(15): X=S/T
  MISC_FEATURE (16)..(17): X=any amino acid
  MISC_FEATURE (20)..(20): X=any amino acid
FXXGXXXXXXXXXTXXXCPXC

SEQ ID NO: 27 - protein, 12 aa, Unknown
  conserved motif
  MISC_FEATURE (1)..(12): conserved motif in Sulf-type Cms1 nucleases
  MISC_FEATURE (2)..(3): X=any amino acid
  MISC_FEATURE (4)..(4): X=G/W
  MISC_FEATURE (6)..(6): X=D/Q/E
  MISC_FEATURE (7)..(7): X=N/S
  MISC_FEATURE (8)..(8): X=G/A
  MISC_FEATURE (10)..(10): X=Y/F
  MISC_FEATURE (11)..(11): X=H/L/I/N
IXXXDXXXAXXI

SEQ ID NO: 28 - protein, 12 aa, Unknown
  conserved motif
  MISC_FEATURE (1)..(12): conserved motif found in Unk40-type Cms1 nucleases
  MISC_FEATURE (2)..(2): X=any amino acid
  MISC_FEATURE (3)..(3): X=S, H, or Q
  MISC_FEATURE (5)..(5): X=T or H
  MISC_FEATURE (6)..(7): X=any amino acid
  MISC_FEATURE (9)..(9): X=V or L
YXXLXXXAXEKL

SEQ ID NO: 29 - protein, 9 aa, Unknown
  conserved sequence motif
  MISC_FEATURE (1)..(9): conserved motif found in Unk40-type Cms1 nucleases
  MISC_FEATURE (1)..(1): X=L, F, or I
  MISC_FEATURE (2)..(2): X=Y or F
  MISC_FEATURE (3)..(3): X=Q or K
  MISC_FEATURE (4)..(4): X=I or L
  MISC_FEATURE (5)..(5): X=F, Y, or H
  MISC_FEATURE (6)..(6): X=N or S
XXXXXXKDF

SEQ ID NO: 30 - protein, 7 aa, Unknown
  conserved sequence motif
  MISC_FEATURE (1)..(7): conserved motif found in Unk40-type Cms1 nucleases
  MISC_FEATURE (1)..(1): X=N, S, or T
  MISC_FEATURE (5)..(5): X=any amino acid
  MISC_FEATURE (7)..(7): X=W or F
XLFTXYX

SEQ ID NO: 31 - protein, 9 aa, Unknown
  conserved sequence motif
  MISC_FEATURE (1)..(9): conserved RuvCI motif found in Unk40-type Cms1 nucleases
  MISC_FEATURE (2)..(2): X=L, I, or M
  MISC_FEATURE (4)..(4): X=R or L
  MISC_FEATURE (5)..(5): X=G or W
  MISC_FEATURE (7)..(7): X=N or K
  MISC_FEATURE (8)..(8): X=S, E, or N
  MISC_FEATURE (9)..(9): X=L or H
GXDXXEXXX

SEQ ID NO: 32 - protein, 7 aa, Unknown
  conserved sequence motif
  MISC_FEATURE (1)..(7): Conserved RuvCII motif found in Unk40-type Cms1 nucleases
  MISC_FEATURE (1)..(1): X=I, V, or F
  MISC_FEATURE (2)..(2): X=S, V, or I
  MISC_FEATURE (3)..(3): X=F or L
  MISC_FEATURE (6)..(6): X=L or Q
  MISC_FEATURE (7)..(7): X=D, N, or T
XXXENXX

SEQ ID NO: 33 - protein, 11 aa, Unknown
  Conserved sequence motif
  MISC_FEATURE (1)..(11): conserved sequence motif found in Unk40-type Cms1 nucleases
  MISC_FEATURE (1)..(1): X=E or Q
  MISC_FEATURE (2)..(3): X=any amino acid
  MISC_FEATURE (4)..(4): X=T or S
  MISC_FEATURE (6)..(7): X=any amino acid
  MISC_FEATURE (10)..(10): X=N or E
XXXXSXXCPXC

SEQ ID NO: 34 - protein, 16 aa, Unknown
  conserved sequence motif
  MISC_FEATURE (1)..(16): conserved RuvCIII domain found in Unk40-type Cms1 nucleases
  MISC_FEATURE (1)..(1): X=G or C
  MISC_FEATURE (3)..(3): X=any amino acid
  MISC_FEATURE (4)..(4): X=L or I
  MISC_FEATURE (6)..(6): X=A or T
  MISC_FEATURE (8)..(8): X=I or N
  MISC_FEATURE (9)..(9): X=I or V
  MISC_FEATURE (12)..(12): X=any amino acid
  MISC_FEATURE (13)..(13): X=G or W
  MISC_FEATURE (15)..(15): X=E or T
  MISC_FEATURE (16)..(16): X=F, L, or Y
XDXXAXYXXAKXXLXX

SEQ ID NO: 35 - RNA, 14 nt, Artificial Sequence
  Guide RNA
  misc_feature (1)..(14): guide RNA hairpin; n=any nucleotide
ucuacnnnguagau

SEQ ID NO: 36 - RNA, 15 nt, Artificial Sequence
  Guide RNA
  misc_feature (1)..(15): guide RNA hairpin; n=any nucleotide
ucuacnnnnguagau

SEQ ID NO: 37 - RNA, 16 nt, Artificial Sequence
  Guide RNA
  misc_feature (1)..(16): guide RNA; n=any nucleotide
ucuacnnnnnguagau

SEQ ID NO: 38 - DNA, 14 bp, Artificial Sequence
  Guide RNA
  misc_feature (1)..(14): guide RNA; n=any nucleotide
tctacnnngtagat

SEQ ID NO: 39 - DNA, 15 bp, Artificial Sequence
  Guide RNA
  misc_feature (1)..(15): Guide RNA; n=any nucleotide
tctacnnnngtagat

SEQ ID NO: 40 - DNA, 16 bp, Artificial Sequence
  Guide RNA
  misc_feature (1)..(16): Guide RNA; n=any nucleotide
tctacnnnnngtagat

SEQ ID NO: 41 - protein, 1064 aa, Smithella sp. SCADC
  MISC_FEATURE (1)..(1064): SmCms1
MEKYKITKTIRFKLLPDKIQDISRQVAVLQNSTNAEKKNNLLRLVQRGQELPKLLNEYIRYSDNHKLKSNVTVHFRWLRLFTKDLFYNWKKDNTEKKIKISDVVYLSHVFEAFLKEWESTIERVNADCNKPEESKTRDAEIALSIRKLGIKHQLPFIKGFVDNSNDKNSEDTKSKLTALLSEFEAVLKICEQNYLPSQSSGIAIAKASFNYYTINKKQKDFEAEIVALKKQLHARYGNKKYDQLLRELNLIPLKELPLKELPLIEFYSEIKKRKSTKKSEFLEAVSNGLVFDDLKSKFPLFQTESNKYDEYLKLSNKITQKSTAKSLLSKDSPEAQKLQTEITKLKKNRGEYFKKAFGKYVQLCELYKEIAGKRGKLKGQIKGIENERIDSQRLQYWALVLEDNLKHSLILIPKEKTNELYRKVWGAKDDGASSSSSSTLYYFESMTYRALRKLCFGINGNTFLPEIQKELPQYNQKEFGEFCFHKSNDDKEIDEPKLISFYQSVLKTDFVKNTLALPQSVFNEVAIQSFETRQDFQIALEKCCYAKKQIISESLKKEILENYNTQIFKITSLDLQRSEQKNLKGHTRIWNRFWTKQNEEINYNLRLNPEIAIVWRKAKKTRIEKYGERSVLYEPEKRNRYLHEQYTLCTTVTDNALNNEITFAFEDTKKKGTEIVKYNEKINQTLKKEFNKNQLWFYGIDAGEIELATLALMNKDKEPQLFTVYELKKLDFFKHGYIYNKERELVIREKPYKAIQNLSYFLNEELYEKTFRDGKFNETYNELFKEKHVSAIDLTTAKVINGKIILNGDMITFLNLRILHAQRKIYEELIENPHAELKEKDYKLYFEIEGKDKDIYISRLDFEYIKPYQEISNYLFAYFASQQINEAREEEQINQTKRALAGNMIGVIYYLYQKYRGIISIEDLKQTKVESDRNKFEGNIERPLEWALYRKFQQEGYVPPISELIKLRELEKFPLKDVKQPKYENIQQFGIIKFVSPEETSTTCPKCLRRFKDYDKNKQEGFCKCQCGFDTRNDLKGFEGLNDPDKVAAFNIAKRGFEDLQKYK

SEQ ID NO: 42 - protein, 1234 aa, Sulfuricurvum sp. PC08-66
  MISC_FEATURE (1)..(1234): SulfCms1
MMMLHAFTNQYQLSKTLRFGATLKEDEKKCKSHEELKGFVDISYENMKSSATIAESLNENELVKKCERCYSEIVKFHNAWEKIYYRTDQIAVYKDFYRQLSRKARFDAGKQNSQLITLASLCGMYQGAKLSRYITNYWKDNITRQKSFLKDFSQQLHQYTRALEKSDKAHTKPNLINFNKTFMVLANLVNEIVIPLSNGAISFPNISKLEDGEESHLIEFALNDYSQLSELIGELKDAIATNGGYTPFAKVTLNHYTAEQKPHVFKNDIDAKIRELKLIGLVETLKGKSSEQIEEYFSNLDKFSTYNDRNQSVIVRTQCFKYKPIPFLVKHQLAKYISEPNGWDEDAVAKVLDAVGAIRSPAHDYANNQEGFDLNHYPIKVAFDYAWEQLANSLYTTVTFPQEMCEKYLNSIYGCEVSKEPVFKFYADLLYIRKNLAVLEHKNNLPSNQEEFICKINNTFENIVLPYKISQFETYKKDILAWINDGHDHKKYTDAKQQLGFIRGGLKGRIKAEEVSQKDKYGKIKSYYENPYTKLTNEFKQISSTYGKTFAELRDKFKEKNEITKITHFGIIIEDKNRDRYLLASELKHEQINHVSTILNKLDKSSEFITYQVKSLTSKTLIKLIKNHTTKKGAISPYADFHTSKTGFNKNEIEKNWDNYKREQVLVEYVKDCLTDSTMAKNQNWAEFGWNFEKCNSYEDIEHEIDQKSYLLQSDTISKQSIASLVEGGCLLLPIINQDITSKERKDKNQFSKDWNHIFEGSKEFRLHPEFAVSYRTPIEGYPVQKRYGRLQFVCAFNAHIVPQNGEFINLKKQIENFNDEDVQKRNVTEFNKKVNHALSDKEYVVIGIDRGLKQLATLCVLDKRGKILGDFEIYKKEFVRAEKRSESHWEHTQAETRHILDLSNLRVETTIEGKKVLVDQSLTLVKKNRDTPDEEATEENKQKIKLKQLSYIRKLQHKMQTNEQDVLDLINNEPSDEEFKKRIEGLISSFGEGQKYADLPINTMREMISDLQGVIARGNNQTEKNKIIELDAADNLKQGIVANMIGIVNYIFAKYSYKAYISLEDLSRAYGGAKSGYDGRYLPSTSQDEDVDFKEQQNQMLAGLGTYQFFEMQLLKKLQKIQSDNTVLRFVPAFRSADNYRNILRLEETKYKSKPFGVVHFIDPKFTSKKCPVCSKTNVYRDKDDILVCKECGFRSDSQLKERENNIHYIHNGDDNGAYHIALKSVENLIQMK

SEQ ID NO: 43 - protein, 1057 aa, Microgenomates (Roizmanbacteria) bacterium GW2011_GWA2_37_7
  MISC_FEATURE (1)..(1057): MicroCsm1
MEIQELKNLYEVKKTVRFELKPSKKKIFEGGDVIKLQKDFEKVQKFFLDIFVYKNEHTKLEFKKKREIKYTWLRTNTKNEFYNWRGKSDTGKNYALNKIGFLAEEILRWLNEWQELTKSLKDLTQREEHKQERKSDIAFVLRNFLKRQNLPFIKDFFNAVIDIQGKQGKESDDKIRKFREEIKEIEKNLNACSREYLPTQSNGVLLYKASFSYYTLNKTPKEYEDLKKEKESELSSVLLKEIYRRKRFNRTTNQKDTLFECTSDWLVKIKLGKDIYEWTLDEAYQKMKIWKANQKSNFIEAVAGDKLTHQNFRKQFPLFDASDEDFETFYRLTKALDKNPENAKKIAQKRGKFFNAPNETVQTKNYHELCELYKRIAVKRGKIIAEIKGIENEEVQSQLLTHWAVIAEERDKKFIVLIPRKNGGKLENHKNAHAFLQEKDRKEPNDIKVYHFKSLTLRSLEKLCFKEAKNTFAPEIKKETNPKIWFPTYKQEWNSTPERLIKFYKQVLQSNYAQTYLDLVDFGNLNTFLETHFTTLEEFESDLEKTCYTKVPVYFAKKELETFADEFEAEVFEITTRSISTESKRKENAHAEIWRDFWSRENEEENHITRLNPEVSVLYRDEIKEKSNTSRKNRKSNANNRFSDPRFTLATTITLNADKKKSNLAFKTVEDINIHIDNFNKKFSKNFSGEWVYGIDRGLKELATLNVVKFSDVKNVFGVSQPKEFAKIPIYKLRDEKAILKDENGLSLKNAKGEARKVIDNISDVLEEGKEPDSTLFEKREVSSIDLTRAKLIKGHIISNGDQKTYLKLKETSAKRRIFELFSTAKIDKSSQFHVRKTIELSGTKIYWLCEWQRQDSWRTEKVSLRNTLKGYLQNLDLKNRFENIETIEKINHLRDAITANMVGILSHLQNKLEMQGVIALENLDTVREQSNKKMIDEHFEQSNEHVSRRLEWALYCKFANTGEVPPQIKESIFLRDEFKVCQIGILNFIDVKGTSSNCPNCDQESRKTGSHFICNFQNNCIFSSKENRNLLEQNLHNSDDVAAFNIAKRGLEIVKV

SEQ ID NO: 44 - protein, 1067 aa, Omnitrophica WOR_2 bacterium GWF2_38_59
  MISC_FEATURE (1)..(1067): ObCsm1
MKNGINLFKTKTTKTKGVDMEKYQITKTIRFKLLPDNAHEIVEKVKSLKTSNVDELMDEVKNVHLKGLELLFALKKYFYFDGNQCKSFKSTLEIKARWLRLYTPDQYYLKKSSKNSYQLKSLSYFKDVFNDWLFNWEESVSELAIIYEKYKICQHQRDSRADIALLIKKLSMKEYFPFISDLIDCVNDKNSNKTFLMKLSEELSVLLEKCNSRALPYQSNGIVVGKASLNYYTVSKSEKMLQNEYEDVCQSLDKNYDITEMKVILYKEKLDNLNFKDVTIANAYNLLKENKALQKRLFSEYVSQGKVLSLIKTELPLFSNINDNDFEKYKEWSNEIKKLADKKNTFCKKTQQDKIKDIQNKISELKKKRGALFQYKFTSFQKHCDNYKKVAVQYGKLKARKKAIEKDEIEANLLRYWSVILEQEDKHSLVLIPKNNAKDAKQYIETINTKGGKYIIHHLDSLTLRALNKLCFNAVDIEKGQMVRENTFYQGIKEEFERNKINCDNQGVLKIQGLYSFKTEGGQINEKEAVEFFKEVLKSNYAREVLNLPYDLESNIFQKEYTNLDQFRQDLEKCCYALHSKIGKDDLDEFTRRFEAQVFDITSIDLKSKKEKTKTTGEMKKHTQLWLEFWKGAIEQNFATRVNPELSIFWRAPKSSREKKYGKGSDLYDPNKNNRYLYEQYTLALTITENAGSHFKDIAFKDTSKIKEAIKEFNMSLSQSKYCFGIDRGNAELVSLCLIKNEKDFPFEKFPVYRLRDLTYQGDFKDKHDQMRYGVAIKNISYFIDQEDLFEKNNLSAIDMTTAKLIKNKIVLNGDVLTYLKLKEETAKHKLTQFFQGSSINKNSRVYFDEDENVFKITTNRNHNPEEIIYFYRGEYGAIKNKNDLEDILNEYLCKMETGESEIVLLNRVNHLRDAISANIVGILSYLIDLFPETIVALENLAKGTIDRHVSQSYENITRRFEWALYRKLLNKQLAPPELKENILLREGDDKIDQFGIIHFVEEKNTSKDCPNCRKTTQQTNDNKFKEKKFVCKSCGFDTSKDRKGMDSLNSPDTVAAYNVARKKFES

SEQ ID NO: 45 - protein, 1084 aa, Smithella sp. SC_K08D17
  MISC_FEATURE (1)..(1084): Sm17Csm1
MEKYKITKTIRFKLLPDKIQDISRQVAVLQNSTNAEKKNNLLRLIQRGQELPKLLNEYIRYSDNHKLKSNVTVHFRWLRLFTKDLFYNWKKDNTEKKIKISDVDYLSRVFEDFFNEWETVIERINTDCNRPEESKTRDAEIAFSIKKIATKQMFPFIKSFVYNSNYKNSEETKSKLTALLNEFETVLKICEQNYLPSQSAGIVIAKASFNYYTINKKQKDYKGYTDDIEKIEKGMNSKFHYERKYDQLLEELNLIALKELPLIEFYSKIKSYKSTRKIEFSEAVSKGLAFADLKSKFPLFQTESNKYAEFLELTGRITQISTAKSLLSKDNPEAQKLRDEIKKLRINRGEYFKNNFHKYISLCNLYKKIADKKGRLKGQVKGIENERIDSQRIQHWALVLEDNLKHSLILIPKEKVTEVYRKVRASKADSTSSSSSLYYFESMTYRALHKLCFGVNGNTFLPEIQKELPEYNPNKQSDFGEFCFHKSNTDKEIDEPKLISFYQSVLKTNYVKDNLNLPQSVFDEATVQTFETRQDFQIALEKCCYAKKTIISETLKKEILEDNNVQIFQITSLDLQRSEQKNLKAHTKIWNRFWTKQNETANYDLRLNPETAIVWRKPKKTRIDKYGAGTSLYDPKKRNRYLHEQYTLCTTVTDNALNNEITFAFEDTKKKGTEIVKYNEKINQTLKKEFNKNQLWFYGIDAGEIELATLALMNKDKEPQLFTVYELKKSDFFKHGYIYNKERELVIREKPYKAIQNLSYFLNEELYEKTFRDGKFQETFNELFKEKHVSAIDLTTAKVINGKIILNGDMITFLNLRILHAKRKIYEELIINPQAELKENEKEYYLYFDKEGTEKVEKIYRSRLDFEHIKPYQEIRNDLNAYFKNVQKNEAKVEDQINQTRRALVGNMIGVIYYLYQKYRGIISIEDLKQTKVESDRNKFEGNIERPLEWALYRKFQQEGYVPPISELIKLRELEKFPLKDVKQPKYENIQQFGIIKFVSPEETSTTCPSCEKKAYELQKEKKGEEKPAENKRYEADKKAGVFCCPKCGFHNRTNPMGYESLDSNDKVAAFNIAKRGFEQNFRQ

SEQ ID NO: 46 - protein, 1157 aa, Candidate Division CPR1 bacterium
  MISC_FEATURE (1)..(1157): ADurbCms1
MLKTFKNFYEVRKTASFKLIPNKIYRQIEMSKEPSNFKDLGKQYVNIINSLSELLYEDEHEDNTEEVGLSTNLGSLISQDDQLKIGEITKSANKSVENHEQIILHGDEKDFDKKDFNKLVRIKHQWIKENFRSDWHKNKENIVSYKTNKDGNRVKTKNWTIIGNVEFLQVFFKDFLKTALEYGNNIIELTESQEHDKSRNSDIKFLLQKIQSKLHLNKIYQLFEGEYINHKNDNSDIEYLREQLRDFKQKANNCIENYKISDSFGMFIEHGSLNYYTRRKTQKDYEEEIIKKSEGLKNKFYGNLGALYGIDKNQPIENLYKEMKIFKASQKSAFLQRLQSGINFTNFQKEFKFIDNRGDVVENFKIVLFSDITEDRYEEMLNLTNQIEKEKNKESRKQLKEKRGKYFQHHLNKYKKFCNDYKDVAMEFGKRKAEIISLQREKVLAERERGYGFFAKDGENNFYINTFDIENSQQAYHELINNKNTKGEIAYYILSSITLRALEKLCFSERSTFSKGNIINKLDEKFIKIQNGSGRKIFKSKKELEEENILIDFFVEVLKHQTNLNLKFKSTQSINILKECKDIGAFEILLKQETYILDEYFISKQNFESILEKYKGISYKITSKDIENNTNKSTFSSWWRDFWEEENKENDYVLRINPEFSISFRLGDKEKYKNTLPFHRKKNNQYFLTMSFSHSADRNYINTAFINEEDRKQSLQDFNDIFNRKNRFDYIYGIDKGTKELVTLGIFKKSNKGLESVNISEKIPVYKITKDGFLHTKTTTKKQPKKGEQPITIHTLAKNPSLFLDEIDNPKIFEKLSITSCLGDLTYAKLIKGKIILNADISTTLNLYKTTAKRSLHNAVTTGKMISKQVLYDNEENVFYYEYENRGILNKEKNLYWKDEFNFLPHKDEFNSLKEEIEFELNEYIKDINSEEDISMQKINNYKNAVSANIVGIITELQKYFEGYICYETLNEQTVKKEFDTFIGNVINEKIYNKLQLNLEVPPILKKFRTEVGNKDIIQHGKILYVNEKNTSSACPVCNEQLLKKDKNGNLSDKNDNEIFKLGGHLSDFENNMKHLTDLEYQERLKNKSFEKANTKKGKIEKNKYNSGILNGKSCDYHMKKNNYGFDFIESGDDLATYNIAKKAKEYLESLPTPPQP

SEQ ID NO: 47 - protein, 1297 aa, Unknown
  metagenome-derived sequence
  MISC_FEATURE (1)..(1297): AuxCms1
MGKNENKYQLSKTLRFGLTLKEKISNNEKTPYQSHSQFRDLIILSENRIREGISTPQNRDLPSFIHRIQNCTDFINDFIHDWWMILMHTGQIELDKDYYKSLTKKVGFVGFWYKENKKKGGKTKQPQARNIPMGELRHLCPQNTKECATYITDYWKDLLITATNKLYESSEQQKKFIKAMEQNRTDNKPNEIDLKKSFLSLVSVTMELLNPILNGQILFNKMDRLDMSKKSDNDFIDFVNDHETVRELNNDIEEIIADFKENGNNVNYCKATLNPDTALKQHNNNIPNDIATDLEELMMDSIVGNYDDVNSFMDNYVSNLSAKDKIKKIKDSNISLIYRAILFKYKMIPANVRRDIAQGMAKKLNKDEENIYSFLCEFGTLRTPQKDYADLKDKDSFNLDNYPLKVAFDFAWEGLAKAWYHDQSDFPIDPCRDFLQENFDVNLEEDQEDEYFLLYADLIELNALLSTLDKGNPADPDSIKNEALEMVEYINWNSLDKKNGNYYKKIIKNRLKSSKGNETYERIKKEISMSRGRLKNKIEKYDDLTSQYKRIAMDLGKKFASLRDKIIAANEDNKVTHYAMILEDSNCDKYLLLQKVSNNIYHCMSYDSSDPKAYYVDSITSSAIAKMIRKETNPSKIREYAELEEKERERRNVDDWCRFISKKEYDRRYQLNINNGLSFEALKKEIDSKSYILVKKNISVDSIRELVENEGCLLFPIVNKDLTKERKTTEDNQFTKDWNMIFSGSETNWRLTPEFRVTYRNPVPGYPNDKFGSKRYSRFQMNAHFVCDFIPSSNSYTSNREQIAIFKDEGEQKKRVEEFNRTLSNINQKFYVIGIDRGQKELATLCVVDQDKKIHGDFKIYTRKFNSERKQWEHYSLEGEKGTRNILDLSNLRVETTIIIDGKPERRQVLVDLSEVLVKDKEGNYTKPNKMQIKMQQMAYVRKLQFQMQANPTEVLEWYEQNPTEELIIKNLVDKENGEKGLISFYGTALVELDQTLPVSKIKEMLEEFKILKQRESKKENVQKELNNLTQLEAVDSLKAGIVANMVGVISYILKTLDYNAYISLEDLSTVQSSTEFASGISGAITKMSREEGRRIDVEKYAGLGLYNFFEMQLLRKLHRIQTDNGNILHLVPAFRAQKNYDHIMVGKEKIKNQFGIVFFVDAAATSIKCPRCGAVNEDKFNPDKQKYPDAEKGPKLRNRKEQSGKKVWVTRDKEDDDRIKCYCCGFDTKEKNEGNPFMYIKSGDDNAAYLISDLGVESYRKAYELAATVVEDRKKTLTNNLNQSNYKIRFLWHTMY

SEQ ID NO: 48 - protein, 1295 aa, Unknown
  metagenome-derived sequence
  MISC_FEATURE (1)..(1295): LAHSCms1
MKNIVNNYQISKTLRFGLTQKTKIQKEGYNGEIYVSHRELADLVKISEERIKKSVSSSDKSNLELSLDKIDICLKQVGAFLSDWQQVYYRKDQVALDKDYYKILCKKIEFDGFWKDVKGQRMPNSRIINISELDTKDSLGVERLQYVLNYWKDNLVSASQKYSVVEEKIKRFKLAIKINRTDNKPDEVELRKMFLSLANIVCDTLQPLCYGQISFPKINKLDDSRADNKKLIKFATDYKSKNDLLTSIAEQKKYFEENGGNVPFCRATLNPKTALKDPNSTDNSIKGEITQLGLDSILKSFKSYLFFENSLEHMSAKEKIDLMKSSGANVVKKGLMFKYKPIPVIVHREVAHELSKDLNKTEESLSDFLRGIGQAKSPAKDYEELTDKNKFNIEAYPIKVAFDFAWESLAKAKYHSEIDLPVAACEKFLNTFFDVKPNNDKFLLYAKLQELNALISTLEYGNPSDEQSIVEKIKALSNEIKWGDFGGSGQGYKKSISDWADSKKDSDGFKIAKQKIGLFRGGLRNEIAEYYNLTQIYKKTVMQEGKLFATMRDKITGAAEQNKVTHYAAIIEDKTGDKYVLLQEVPLNKQDRIYDKMDRNGDGYVSYFVNSITSRTIAKQLRKKRMAELMKNNARGIYNNVSNIQQPALSDKEKEERNIKEWISFISEKRWDYEFNLNFKGKNFEEIKKEVDANGYELENRILSRDALEELVKNKKCLLLPIVNQDIIKESKTESNQFTKDWNSIFDGNSPWRLTPEFRVSYRKPTPDYPMSDKGDKRYSRFQMIAHFLCDYIPQGGSYVSVREQIDNYKDDKKQEIAVKDFHDRLLGKTDEQKFIEGLGGLSSLGNVTIKTKLKKQDISKEKFYVFGIDRGQNELATLCVIDQDKKIQGGFRIYTRLFNNEKKQWEHKFLEERNILDLSNLRVETTIVIDGQEKREKVLVDLSEVKVKDNSGNYVKPNKTQIKLQQLAYIRKLQFQMQTNPGRVLEWYSHNQTSDLIIDNFVDKQNGEEGLVPFFGAAVAELKDTLPIDRISDMLKQFVELKNLEKQGEDVKSKIDQLIELEPADNLKSGVVANMVGVIAFLLKKYSYKVYISLEDLSKPFKDQIVLGISGVPIGIKKGMAGRSINVEQYAGLGLYNFFEMQLLKKLFRIQQDSSHILHLVPAFRAMKNYDNVAVGKGKIKNQFGIVFFVDAAATSKTCPCCGAINDRQFAPDLRKFPNAKKIETPDGKSVWLERDKTDGKDIIRCHVCGFDTSKEYDDNPRKYIKSGDDNAAYLISAECIKAYELATILVDNK

SEQ ID NO: 49 - protein, 1217 aa, Smithella sp. M82
  MISC_FEATURE (1)..(1217): Sm82Cms1
METILYQRTRSIRFKLEPIEAEEIEKEITVIKTQDNDGLVQDCIFLVNKGNELANKLSKLICRDYNCDEQNNISLKLRKDVDVKYVWLRLYTKNEYYDWSEPNNKTKIYSLAEIPYLSEKFVHWFASWKRDLAILNEQITKKTEEQHNLNRRADIGLIIQSLSKRNSFPFIKEFIAAMNPKNASKIEIEEIVKEIDELLNKCEKGFLPTQSSGYPIARASLNYYTIFKNPKDFDKEILELSGEKFCNDNQNECEILKAFFTHCFDVDGFCGMFLDVKKLENICSKLNSIKNYQENDKQLIAEAIDNKIKLLNEEKDNSKKKKAKKIIEQLENDKKIVCNFWELQENFYVQERNSSKNNNNKYCLNKNYFLIQQLCQSMKLFKAREKARFNEAVQNNKDLPYGQLNQFFLFSAIQIGNENDKRKTDNEVFDDFMKHNKELHDISDKISTLKQNKNLDEKNKKELDKICTQKDQIAKSRGKYFTDLDHNKTYFSNYVKFCNVYREVALKAGQLKARIKGIEKEKIESQRLKYWSVIIEENKKQYVAFIPKSNDYAKKAYENYSKIYTNDNSINTCQLHYFESLTHRALEKLCFSGVQERTNTFQPEIKKELSIEKFPNYYEKGYFIKGEYFFNDKKTGIKDESKLIQFYKDVLNTQYAKSALKGIPWEQLKKTVLDIQFENFDGFRQALEKFSYVKHIKTKKDLLNELSKEYDAQIFEITSLDLKRQIKEDANLKEHTKIWMEFWSENNQSNNYLIRINPQLTITWRDSKESREKKYGEETSLYDVNKNNRFLKPQYTISFTITENATTQTMNTAFKDAQTKKDQIHEFNKQLFQSYQPQYFFGIDVGNIELATLCIINPEKDLNEEKMSKESLQYFDVYKLKKDQYNFSKPYHFKTRNETRERKAIDNLSYFAIEENYKQTFNDDNFEACFSDLFEKPVNTCAIDLTTAKVLGDKIFLNGDIKTYLSLKERNARRKICQIIEKHPNAKLLINGNKIFFQESTSCERTCLCQEPIYYFNDKYDREVQTLADINNRLEDYIKDKDKSELIEESKINHLRAAIAANMTGVIYHLFEKYQSLIVLEYLTISDIASHKKGLKAFEGNITRPLQIALFRKFLKSSLVPPALSEIIQLREKAKDRITKIGIINFIDKTATSVSCPNCLGKFENYNDNKRKGFCLCPDCGFDTRTDLKGFEGLDGPDKVAAFNIAKRGFEDLQKHK

SEQ ID NO: 50 - protein, 1148 aa, Lentisphaeria bacterium UBA7640
  MISC_FEATURE (1)..(1148): LbCms1
MSNKMTYQYTRAIRFKLNNPSKTGFYHPPENKKVDLNDLLSKTDSVKNDINDLLFFDGKIQKKLEVKKNWLLLHHKNEFIFYTKNNRSKKYKLSELNLNANDENYFKNRLGILLNDWTHYTSILADANNRPDESLIRKSEIANAVRSLLNKHILGYLIDLLNNLSSSNDYLLDGKCDELKNKLCSIREYLQFLETEYLASQSSGIECARASFNYFTVNKKNKEYFDNQIDEIQKEQAQNYGEIKDNKLSVIQRGDIIFDFKTEQEKQWLKLYLGKNDINDEKLTKQQTVTLLANFKSDQKSIFHEVLGHSHSDAKNTIYTNNNRKLSIGTSNISYKSITQVSDLESQFSLFNLKGDKKTFDKLLNPHKGNKNVKHFFCGQNPYFHLFKKYCSNFADVAKENGQLTSQIKNLEKQRLESQRATYWAMIYKKDESVKLLLIPRIQIMDSRKYIDSLKQAPNGNLFVLQSLTMRALEKLCFAEESTFVNDMDAELKSLQKKIKETVTEPTSHEKKAGSVDKIRAEKLANKLMEKLKFFKKVIMAQYTRDRIDLNHFDLSACQTAEDLNAFELELEKACYKFTTYKLSEQEYDKFIQDFDIQTFDITSYDLEGRNKSSAPESADRKFTKIWNQFWNNESNNEFGTVRLNPELRINYREADYNLKQFFEKKGFSKIFKHRRLQEQYTVTFSFALQAGNIYEDLSFVKPEDQIDKINKFNNQFREKMPYDSAWKYGIDVGQIELATLCLTRKTDQFYSANNEIFCKYEFPEIEIYKLKDLNHNENYDTKTETNKIRYAIKNISYFIDQVELFEKYTTATIDLSTAKLIKGKIVTNGDLISYLKLQKLVAKKRVYEIFHRDQIDYQDTMFIELSDLKYNHNGREKTPGELHVSVIFKEQENTNQKEGRTVFSFRKEWANLTGYTTADIENSLKIYLSDIQTLTKQRKSDKRLGKDVRQENLHTPTFEQINNLKQALVANMVGIICHLQETYPGYIFLEDLKKASIDNQFNQNNSHIARKLEFSLYKKLQSLGLVPPHIKDIVALREVIRKKDDKFNCQFGIMIFINEENTSKTCPYCRKKSRKDNVKKMQKHAFDCDPENDSASCGFTTCSTKKEFQFLKSIDNPDSLAAFNIASKIDDKDLLIRLSLPVRHGKR

SEQ ID NO: 51 - protein, 1158 aa, Unknown
  metagenome-derived sequence
  MISC_FEATURE (1)..(1158): Unk1Cms1
MENFKNLYEVRKTVRFELKPSRKKTFAGGDIFELQKDFEEVQKFFLDIFVFAIEQEKLYQEEEEEGKLSRYTKIEFKKKREIKYTWLRIYTKNEFYDWNGKNDKEKNYALSKIDFLEKEILRWFNEWQELTVNLKNLTQTKEHEKERKSDIAFVLRNFLKRQNFPFIKDFFNAVIDIQEKQGNESDEKIRKFREELREMKKNLNTCAKEYLSSQSKGVLLHKASFNYYTLNKTPKEYENLKLQKELEIDNILPKKICKRVRWNKEKKQEDILFECNSDWLVEIKLGYDIQKWTLDEAYQKMKTWKADQKSDFNEKIGNFIDQYLKKGFIEDLMNENEKKNAEAILREFSVFKPIENFYFYDFLERTKEIKILSNQKNNILQKYNKNAKYFEKIITYKIKDKEDLTEDEKEYQELEKSIEKKAKERGKFFNAPKEKVQTQHYFELCELYKRIAMKRGKIIAEIKGIENEEVQSQLLTHWALIAEEGEKKSVVFIPRKNGEELENHKKAHEFLQKQEKKEFGDIKSYHFKSLTLRALEKLCFKETENTFTPEIKKETNPKVWFPKYKQEWNDEPQKLINFYKQVLQSKYSQKYLDLVAFGDLKSFLETSFDDLQIFESGLEKTCYIKVPIYFSKEGFETFTNRFDAEVFEITTRSISSESKRKENAHAEIWKDFWSKENEEKNHITRLNPEVSVFYRDEIEKKSNALRGNNKSNINNRFSASRFTLVTTITIRATHKKSNLAFKTEEDIKSHIDKFNEAFQNFSGEWVYGIDRGLKELATLNVVKFSDEKNEFGVIKPKEFAKIPVYKLKDEKAILKDENGKDLKNAKGEARKVIDNISEVLEEKKEPDSNLFEKQGVLSQGISCIDLTQAKLIKGHIILNGDQKTYLKLKEISAKRRIFELFSTSKIDKNSELRVEKTTISINSEDGKRDFYWLTKNQIVNSETKKEIQKEQQEKLDNLKVIFIDYLEGLCVKNKFEDIETIEKINHLRDAITANMVGILFHLQKEFKGIIALENLDTVREQSNKKMIDEHFEQSNEDISRRLEWALYRKFANMGEVPSQIKESIFLRDEFKVYQMGLLKFVEVSGTSSNCPNCDKEVGKTNSHFVCKGENNCGFSSKENRNLLEQNLNNSDEVAAYNIAKRGLKLINQKWNNTSKSQN

SEQ ID NO: 52 - protein, 1290 aa, Unknown
  metagenome-derived sequence
  MISC_FEATURE (1)..(1290): Unk2Cms1
MNSIKNEYQLSKTLRFGLTKKKKLLKDDCNEIIYESHTELKELVLISEKKIMESVYINQKAKLDLSVDQIDTCLSSIKNFIDSWKGIYPRADQIAIDKDYYKILCKKITFDGFWIDEKTKTKKPQSRTILLSELSKKDASGKERKQHILDYWKNNIFSAIEKYEVVSRELKQFQKALKIQRTDNKPNEVELRKLFLSLANIILDILKPLVNGQICFPKIEKLDISKTDNKNLIDFATNHKFQSDLLNEIAELQHYFEENGSNVPFCRASLNPKTIIKSKLSTDNNIDKEIKQLGLDRILNEYLSAPYFDNSIIHLSAKEKLNKIEDKKENYITRGLLFKYKPIQIMLHHEIAKTLSKEIGKSEENIIEFLGNIGQIKSPAKDYEVSKEDFNINNYPLKVAFDFAWENVARNLYHTDTHAPIDECRKFLADNFDIKIEDNNLKLYANLLELNALLSTLKYGKPKDETSIKQNIKDLLNKISWNEIGKSGQKNKTNIENWLNNKDKIDNQNGIENAKKQIGLFRGSLKNKVPKYYKLTETYKDISMKMGKIFATMRDKITDEAELNKVSHYAMIVEDDNKDKYILLQEFTDKKEECIYSKTQTHNSDFTTYSVNSITSSAIAKMIRKVKAEELRKNQYNKDTFSIEETKEEKENRIIKEWKQFLKDKQWDYEFNLDTKNKNFEELKKEIDSKCYKLNISYIDKKTITDLVENKNCLLLPIINQDLSKEEKTQNNQFTKDWDAIFSQNTPWRLTPEFRISYRKPTPNYPISDKGDKRYSRFQMIGHFLCDYIPQSNTYISNREQIANYKDNEKQEQAVQCFHDKLLGKTEKEAKNEKLIALQAKFGSISRTNITQEKKKEKFYVFGIDRGQKELATLCVIDQDKKIIDDFDIYTRSFNSKTKQWDHTFLEKRAIMDLSNLRVETTISIDGKTEKKKVLVDLSKVKVKDKQGHYSKPDKMQIKMQQLAYIRKLQFQIQTNPDVVLAWYSDNNTQDLILENFVRKDDNDNKGLVSFYGAAVEELKDTLPIEEILNMLKQFKELKEKEKAGENVKYEIDRLIQLEPVDNLKTGVVANMVGVIAFLLEKFNYQVYISLEDLSQPFDNKINGGITGVPIKTNKESGRMADVEKYAGLGLYNFFEMQLLKKLFRIQQKSTTILHLVPAFRAQKNYDHVTVGQDNIKGQFGIVFFVNANATSKTCPICGANNSEKPDKNKYPNAHKELAKDGKEVWIERDKSNGNDIIRCFVCGFDTTKTYEDNPAKFIKSGDDNAAYLISVSAIKAYELATILAIEKYK

SEQ ID NO: 53 - protein, 1091 aa, Unknown
  metagenome-derived sequence
  MISC_FEATURE (1)..(1091): Unk3Cms1
MAGTPYTGHVACKYCKITSWATYDRIKINKINMNQSFINGQNFYELRKTIRFVLDPKTLKRPYTPSSDEVNLEEQLNNFIEKYQQGINDFKYIVYFGPKTAETKELNKKISIKHSWLRNYTKSEFYSIKDKLIQLDYNGNKASIGNSNLKFLNEYFENWISENQECADALKNCINAPAEKQKRKSEAAHWVRKLTKRSNFECIFELFNGNIDHKNSNDDIEKIKHCLNECKTLLTSLEKMLLPSQSLGMEIERASLNYYTINKKPKNYDEDIAQKASALNEAYQFKADDKAFLNRVGFSDDGVPINELKEAMKKFKADQKSKFYEFVNQKKSYSDLKKNDDLKLLNDISEEDFNKFKETQDKMTRGKHFQFSFPNYKKSEKNFCDLYKNVAVAFGKIRADIKALEKERMDAEKLQCWAVILEKDNQRYVVTIPRDANNNLTNTKQYIDNLQNEENDQWILYAFESLTLRSLDKLCFGLDKNTFIPAITGELYQKNNSFFEKGLLKRKDQFSQNGTDLAAFYKTVLELDSTKKMLGINKYADFKAFISKEYTALEDFEKTLKETCYFKKRVFISEDTKNKLINDYQGNLYKITSYDLEKDDSEALGTLINKKQFNRASPEIHTKTWLDFWTADNETDKYPIRLNPEFKISFVEKQDKDLNMRNLGLLNKNRRLKSQFLLSTTITLLAHEKNADLHFKKTDEIQTFINSYNQEFNKKIKPFDIYYYGLDRGQKELLTLGLFKFSENEKVSFTKQDGTVGEYSKPKFIPLDVYQIREGQYLTKNKKGRLAYKSIDQFIDDEKVIEKLPVNSCLDLSCAKLVKGKIIQNGDVATYLELKRVSALRKIYENTTRGQFKTDRIGFNKDKGCLFLDIENRGKLENNNLYFYDNRFAEILSLDSIIKELQDYYNEVKNKQNIEFISIDKINHLRDALCANAVGILAHLQKTHFGVIVFEGLDARHKNKETTEFAGNLASRIERKILQKLETLSLIPPQHRQIIDLQNSKQIKQTGAVLYIEEKGTSANCPHCETANPDKSEKWLAHNYKCKNSNCNFDASEISKRKDLIGLDNSDSVATYNIAKRGLLEMNQKIEQSKV

SEQ ID NO: 54 - protein, 1108 aa, Unknown
  metagenome-derived sequence
  MISC_FEATURE (1)..(1108): Unk4Cms1
MEKFKITRTIRFKANPISINKLQDQTKSLSENSEADIVGIINNANQIINDLEGLIFTNEEKNNLRKDVTIHFRWIRQYVKNDWYAWKEKQTNNSKQAEKGKSKSAEKDQLKSPLAQLALLRDKFPDAHKTSKTIQSSSPNSNKESSEKKLPLGDVPFLKEEFTFFCNYWREIAEKLNEAYSREEHNRMRRADIAKHLNELSKRQILPFLSDFLANGNDKKNDEKIKNLIVKVIEFKKDLEIAKNAYLSAQSSGIMLARASFNYYTLNKKPKDFDSEERRIIENMNAKYYQPGNIPQIIKDLKIDGSLSIEKLYEELKSYKAEQKAKFQEAISQGLKFEELQAKFPLFETTQEIFNDYVSKTNLITQKATQKNNTPKGSMEFKRLQDEINKLKRERGKMLQQGKFRNFKALNEEFKRVAVKKGKLKAQLKGIEKERIDSQRLQYWALIGQEENKYKLILIPKENVSKAYTEIVNQRWIDDRVSMYLYYFESFTFRALRKLCFGVNGNTFMPEIKNELPKYNQQDFGEHIFKTEDGKGDEKALVEFYQQVLKTDFVLKNLALPHQQMEEVTTTTFKDLNSFKIALEKICYNKKMVASPRVLRNLELSYGAEIFELSSQDLLKEHSTNLKNHTKIWNLFWSKENEEKNFDTRLNPEIGIFWREPKASRIEKYGEGTAHYDPQKKNRYLHPQFTIAFSINENALSNDLNYAFEGFEKQKEAMMEFNQKINKEFKDGMEQKKLGAFGVDTGEAELATIGLTDNGKPFPVKVLKVKSDKLNYSKQGYFKDGAMREKPYKAIDNLSYYLKKDLYDKTFRDDHFEQTFREIFEEIETETIDLTSSKLICEHIVVNGDLHTRSKLNILNAKRQIRQALITNPNLEIKFEDNKILISETDEERKKINPWKAVYHTNEELEQIKYFEAVKEEIEQYLKKVQDDSAEVLQNINRFREVAAGNMTGVIFHLYNKYPILIAIENLAQGTIEKHRLRYEGVMDRPLERALYRKFQSIGLTPPVSDLIAIRDNLTQKKKDKMSQLGVLQFVDEQNTSKTCPHCEKNAYEGERKNLYLEEKKKGIFSCGHCGYQNINNPMGLSLHSNDAVAAFNIAKRGIKNLKK

SEQ ID NO: 55 - protein, 1113 aa, Unknown
  metagenome-derived sequence
  MISC_FEATURE (1)..(1113): Unk5Cms1
MAGFDKLKNQYEVKRTIRFNLTPVHFSYKKISSESFESKLKEFVSVYGDVIDSFKRMMFIEEYGEISLNRDIHVRHEWMKIYAKQDFHLNKEIIVRYRKNRKGENIKSNTDTSLEKTPFIFDLFNKFLMDNLSSDDYKDGILSNLEVIIREPLDEKSGKSNLSYLLNKIQKRSNFEFIYQLFKNMQSKKSDFEIEECKKKLDRCKELLLSLNHYLTPKNSSGLEVERTSLNYFTVNKKPKDYKGEKKRIYDKKNIPINNRVLNGNQSKYNEVLKESGFYNRYNKKNFSDFSLEEFYKNLKEFKAEEKSKFFELINFGASLNRINEDIPLFELSDIERGKNKELSFDSFQKETEKIKKLSDDLNGQLNDTLKKEIKELKIKRGRFFNVNDDENCPFQRYITYTKLYRDVAMEYGRIKADTKNLEKEEINAERLASWSVFVKIENGYFLMTIPKHKDNHSSLSSAYYDLKDTKSVDGEYNIYITESLTLRALEKLCFGLDKNTFVNEDFLEELNMLSPEYIVHKDGKKSIKRKDEILKESELKLINFYKKVLSMITTKKRILINDFKDNSCKDNYLSGDIKTLRDFQIALEKKCFTRKEVRVSKDFLNDFRNKYSAKLYKITSFDLEKRRENPESHTNLWEIYWTQSNEGGYTTRINPEMRINFIDKREESIKDKSGNEVERNRRKDKEFILSLTITEHNDKPKFDMAFADKKKVIKNINDFNTTLNSKLQDGKLGIYYYGLDRGEAELVTLGAFKFLDEIVKVDTGCLYNKPKAVKIDVWELPEDKLMEQVPYETKSGTMYFDAYKNISKCEHLLIKKETESCMDLSCAKVINGKIVLNGDISTLINLKLENAKRRINNHLYDFMKAKYKKDGKVDIRIEYKEKTKNKPERFDLYINNGEFKELGIYYPKFAIEKKIAMTQLDQYIVELRDIINNQKSVGLNIELEKVNHLRDAISSNIVGILNFLYKDFPGFISLENLETDDKNEKLGKSKVNLASRIEYKLLNKFKTLGLVPPNYKMVMSLQSKRDISQLGILNYIETSGTSSNCPHCGQSINDKEREENKWRNHQFRCSHCGFSSYENEDHKGLDFLNSSDDIAAYNIAKRGLEYINSLKK

SEQ ID NO: 56 - protein, 1255 aa, Unknown
  metagenome-derived sequence
  MISC_FEATURE (1)..(1255): Unk6Cms1
MNHIYNNYQVSKTLRFGLTQKQKIRRPGYTGELYESHKVLKELVKISEEKVKNLIVPAKNEELLSSLDSVKWTLTEIREFLDQWRYIYNKSNQIALDKSYYLILSKKLGFNDEKKSRVIKMIEIKDDIKEKIINYWAFNLNESNQKLLMVNEMVNTQLKALEINRTDHKINEIELRKALQSLFNTVLDILKPLVYREISFINLEKIEKDSKNSLLEKFATDFQRKIDLLEKIRSLKTHFSENGGNVSFCRATFNPKTAIKNPKSNDNSILKEIKKLGIKDILENNENVFYFEKKLAEITAKEKLEYIIKDSESFLIRSLLFKYISIPAFLHHGIATELAPIISKEKNDLINFMISIGQIKSPAKDYADIPNKNDFNVNAYPIKVAFDYAWETVAKSQYHHDINAPVSMCKTFLDENFENCTKTKYFTLYSDLLELHTLLSTLDYGNPSMEDSIIDKANKIIAKIDNKEHKTKDKDLDKDIDKYKETIKNRLNHKNFNDKQRYSDAKKELSQFRGKLKNENDIYRKLTESYKKIAMNTGKIFAEMRDKISNASEQNKISHHALIIEDHNKDRYLFLQEFTTDKEKQIESICNDQAGQYIVYWVNSITSKSISKMLSKKRIEKLKQKKIINNSIKTSILSDAEKEARDIKEWVSFIKEKGWDIDFNLDLQNKNLEEIKKEVDAKAYKLKETLISQKTLSNLVKEGNCLLFPIINKDLVKKVKTEKNQFTKDWNSIFKKDNLWRLTPEFRVSYRQATPGYPTSDIGTKRYSRFQMTAHFLCDFLPQGTKYISNREQIENYKSSEKQKEAVEIFHQQIENDNNNVISTQSLNHLARHFGSKNIKKKHNTIEKKFYVFGIDRGQKELATLCIIDQDKKIEGPFKIYTRSFNTKTKQWEHQFYEERYILDISNLRVETSISIDGKPDQQKILVDLSYYKEGEKFIKLPKMQVKLQQLAYIRKLQYQMQRNPETVLDWSYKNTDDKSILENFVDKPNGEKGLVSFYGAAVIELKDTLPLSEIKDMLERFKELKGKEKNGEDVSQQLNELTQLKSVDHSKYGVVANMVGVIAHLLERYDYKAYISLEDLTKPYSAIDGITGQKTDAKSISGKQQDVEKYAGLGLYNFFEIQLLKKLFRIQKDSQNTLHLVPAFRATKNYENLIAGEDKVKNRFGIVYFVDPKSTSIMCPSCGKTNNSSNKEKRVVRDKKNGNDIIYCEFCGFDTRNDYKENPLKFIKSGDDNAAYIISTHTAKKAYELAKSIL

SEQ ID NO: 57 - protein, 1255 aa, Unknown
  metagenome-derived sequence
  MISC_FEATURE (1)..(1255): Unk7
MSLAAFTNQYQLSKTLRFGFTQKEKVRKENFDGSIYQSHAALRELTIESERLIKGKLKSNTDTALPLEKIRACIEEIKRYTDTWSKIFTRDDQLALSKEYYRVMARKARFDAFWKNYRDVKQPQSQIVRLSSLKSKYNGKERKAYLVDYWAGNLQTVKQRLVDFEPAIRQFESALKDNRTDRKLNEVDFRKMFLSICKLVNETLVPLCNSSLCVPDLEKLLDNEASQELRDFVMMDIFQLQEQIEALKIYFGENGGYVPYGRTTLNKYTALQKPHAFDEEIEAILVKLKLSDVINNLIKQDDVSDYFENVKDKIGQLSNSSMSVIECVQLFKYKPIPVSVRYSLVEYFHRKLGIDKDELGTLLDTIGKPKSPAKDYADLQDKGDFNLYKYPLKVAFDFTWESLAKAQYHEGLNFPEVQCQKFLENIFFVNTSCEAFKTYALLLHLRGLLAKLDHEEPNDREAIIDKAISLMNEDAFPKVPLRGTKGDSANQAILSWLQLSKEEQVYKKEKKDQSYNQYEKAKNKIGLLRGEQKNKIGKYREVTEQFKDLASNFGKLFGALREKFQAKNELNKITHYGTIIEDNNQDRYVLLYPLSEGIIDLDKLFVHEESGTLTSYYVKSLTSKTLNKLIKNKGGFKDFHMDGQQPDWERVKKRWSVYKDDKAFLKYVKRCLNESEMAKAQNWGEFGWDFSSCDSFEEIEREVDKKGYSFKNDRKLSEDTVKRLVKEEKCLLLPIINQDIIVEETKLRNQFSKDWVNIFDADCTEYRLHPEFGMSYRMPTPNYPKPEQKRYSRFQMIGYFQCEIVPIKTEYLSKKEQIEIFNDADAQKEAVEKFNEIVNGSVKPNDYVVIGIDRGLKQLATLCVLNKDGAIQGGFEIYTRSFNADKKQWEHRFMDNRDILDLSNLRVETTVDGKKVLVDLSSIKVKDQRGNYTQDNQQKVKLKQLAYIRKLQYQMQVNPEKVKAFAAQHRTPQDIKDHMKELITPYKEGSHFADLPLDRIKYMLEAFCAFHTENDQTSLRELIELDAADNLKSGIVGNIVGVIAFLLKRFSYNAYISIENLTRAFYNQRDGLSEKEIPRDHDFMDQENLVLAGLGTYHYLEVQLLRKLFRIQCDAGIINLVPAFRSNDNYETTRKLSKKQGVEYVCKPFGIVHFVDPMYTSKKCPACGGTTVQRGSFKDDITCQNPLCGYGTSLDISEKIQKLISANKAGQNIHLISNGDENGAYHIALKTLKNLFGNIQNANNERRYVKSFRSK

SEQ ID NO: 58 - protein, 1046 aa, Unknown
  metagenome-derived sequence
  MISC_FEATURE (1)..(1046): Unk8
MTHQYEFTRTIKFNLNNKKDNDAAQLKKFFSDEHINFQELFNDFEGSFSALLDQFKKAVYLKSGNNFGNNLRVKNSLEIKKSWLKQYARDEFYKIDEKQRKYNKFPANLFQSIFNGWLKRNESLLEQFKKINQMPQESQIKRSEILTLLQEIKITDNFLFIKNFVQPGIANDKNSDSDLENLKEKVDQFEILMNKAIFAMAPDLSQGVEVCRASLSYYTVNKVSKRDFDTELEGKRKELKQTYNKELNQQLLQTVGFLDYLENEYQSDIQLVSIQDLYKALKKFKAQKKSEFMQAVQQGKQAEELIKDFPLFNVQKDVMQNFINISNKIDEKNLQKQKSQNEKEKKGLTEEIRKLRINRGKYFQNRWGFPNYVNFCNNVFRPVAIKIGNLKAQIRAIEQEKIEARLLQYWAHILKKGNQYYLLLIPKEKMQEVKDFLNNSSPSQEGEYTLYSFNSLTLRALKKLIRKNLGKEQTHLQNDNTAIELYKKVLQGKYSELQNLDFSGFEEKIKEIVQGNYNSEEYFRLKLERVAYCCFEQKISQETIAHLHRSFSALLLEISAYDFERNISSKMKEHSKVWQEFWTVENKNEHFPIRINPEIRIFYRPKREQEDLQKGKNRFAKDHFGVAFTITQNAAQKNLDLAFAKEKEISEAVKKFNEEIIGEFIKEKGNDLYYYGIDRGQQELATLCVVKFSEKQGKTKLANGEMRKFNIPVPVPIKLKLYRIKEDCLNSEKEIIIDRYGNKKNVKMFENPSYFIDEKEKFEEIESTCFDLTTAKLIKDKIVLNGDVRTYIELKKANGKRQLFEKLSKIEDKAEIEFCEDENGKRFQIKSKTTEINKYQYIIFYSPEDEKIMPRDEMKKYLQNYLNNLRNGNLAKENISIEKINHLRDAITANMVGIIAYLFLFKKYQGIINLENLIETHFSQNNENIERRLEWSLYKKFQKFGLVPPQLRQTVFLRKENNQLNQIGIIHFVSKKNTSACCPRCGNIVPMRKRETDKFKYHTFICDKCGFNTQNPKSPFDFIKNSDEVAAYNIAKSNLNKFYYNG

SEQ ID NO: 59 - protein, 1114 aa, Unknown
  metagenome-derived sequence
  MISC_FEATURE (1)..(1114): Unk9
MLQKGTSKMLIQFKNHYSYNKSIRFKLEHKNGKLPKLESDNVDLNKLVDIGNSLKDIFEELVYTKNNYNKLNSLVSIKKQWLKIYFKNEFYSNGKIQNYSLSNFSYLPNKLIEWLNNWQNNLKALIELTKQQDFNKTKKSEIAYILSLFNGKYSFSFVKDFSTCINHKNSQEQILKLQGVVENFEKVLNLCIQEYLPSKSAGVVIAQGSMNYYAINKEPKRYDNILADLNQKFEELDKEYIAMKQYKSSQKSRLFEFIRKGFSKDQILSEFKKKENNEVSFVYNNQIIIRIYTQELFKDSYCLGEVIKLTKKIEELNESKDSNNNLPEETKKEITKLKKEIGFYFIRRTRGKSHNNYFKSYYGFCNDKFKKKAQERGRLLTKIKAIRKEKIESQNLRYWSLILDDGKDKFLWLVPKENMQEFRRELSKIHPSGESSLFLFHSLTMRALHKLCFAQESDFVKEMPKVLKEEQLNCEKASNDTETNKRIKRNFGLNYIKTKDELTLSFLKKLIISEYAHERLDLNHFDLSKLQVATTLNEFEEYLEDACYYLEKISISSSMIKELLEEYNILNFRITSYDLEKRNKNTYQTPESDIKRHTKEIWNKFWEGDRFIRLNPEIKIRYRQKNQNIEDYLKEKGFDLTKIKNRFLQEQYSVSFTFALNAGKKYPKLAFVKTEEILEKIEEFNDEFNKQYFDNSYKYGIDRGNIELATLCITKFNKNDTYEYKGKKYLKPNFPTSQEDIKTYELKNEWYKRTAISNIETKPKNKKTPKRIIANISYFIDNVENEEWFNKKTCTSIDLTTAKVIKGKLILNGDVLTFLKLKKEAAKRILFELVAQNKLTAKNKELKWKSDDGNNSDSVRLICDVLDNETNSIYFYEDSKYGRGFEGLLTTDKTAYSKEGIRINLQNYLNHLISEKENKSNKAYSHVPSIEKINHLRDALVANMVGVISYLQAYYPGIVVLEDLNHKLLIKHFEDLNINISNRFEHALIEKFQTLGMVPPHIKDYLEIRSSFRMSRNDSSQFGALIFVSKEGTSKECPYCEKKWNWGKEKEIELKFSKKQYICGKENSCGFDTKHIQNTFEFLSEINDPDKIAAYNIAKRGFKSFINKSSIKKQ

SEQ ID NO: 60 - protein, 1033 aa, Unknown
  metagenome-derived sequence
  MISC_FEATURE (1)..(1033): Unk10
MENSNLYQVVKTIRFKLEPVGKMDTPKFGDKNAESKANLTPFIELVKKTMTNVKALVFSKQDGEDGEKWRKILEVNYRFLRSYLKNSFYENRGDSQEKSKKHKISDLEYLQKALENLFAEFDEILDGLEDFEKRNTKNQYEKQRHAQAGLLLNRLCKRSNFGFLKAFVGALAQTNKPFFDDKTDKLKKQIDKFETELEKQKEFFLPYQSNGVLFAGGSFNRYAINKTPKMLDKELREEQTNLKKSLCEHKIKIDTLNTLGLKNDCPCTSLDNSYTFIKDYKAKQKSKFIELVQKGEFDEAKKVNLFECSETDFETFKTRTKQIQNEKDKDERTKLKQKRGEFFKSQKRGKFFKSQTQNYENLCDLYKKIAQKRGQIVAKICAIKKEKEMCEQVKYWCVALEKGGEFYLYMFLRDENDNIKNAYDFVSKLQTQKSGETKLHYFDSLTLKAVRKLCFKETDGSFKKALKNVKFPECEQNLDEKVKISFYQNVLKNAKTLNLSKFENLQSVTEGKFESLSEFEVALNMVCYTKTVCVSESVEKELKKFKPLVFHITSQDLAAKREKKAHTQIWHEFWRESNEKSKFPLRLNPELKVMWREARPSRVEKYAEQSDKFDPNKKNRYLHPQFTLALNFTQNAHNEAINLAFKDVQNKGEAVKKFNENFKSSEYAFGIDVGTKDLALLCLIDKNKKPVNFDVYEICNENEICNEKLGFEKFGFYKDGTRRDEPYKLIKNPSYFLNESLYKKTFNATKEEFERSFSELFKRKSVCALDLTTAKVICGKIILNGDFSTHLNLKILNAKRKISAKLKKDPTLKIEYDNDDNILFGSNVIFYYNNKYEIVRPYDEIKNEIFEFHEKQRLDDARLEDNINKTRANLVANMVGVISFLHKEFSGFVVLENLKQSEIEGNHRLKFEGDITRPLELALYRKFQSKCLTPPISELIKLREGEKNENVESDLILQFGIIKFVDKDKTSRLCPACGKDAYENNNSKYKTDKKDGVFECAGCGFNNKNNAGDFAALDTNDKIATFNIAKRGL

SEQ ID NO: 61 - protein, 1234 aa, Unknown
  metagenome-derived sequence
MEKNEIAISEYQTQKTIRFGLTATNQNLYSEEIMKLLDISEKRVEKQAEQAKKVNNDADKNNQLRCCLDQIKEYLKTWSNIYPQIDFLAITKDFYKVISKKARFDFDKGNGSEIKLSYLQSTYYNKKRYLYIIESWKENLRKTENLYRKSDDLLKVFEEAKNQNRDDKKLNKVELRKTFLSLFNLVNESLKPLIEGNLFIVNDDKIDEQNPKHDCVSVFISKTEERRKLYDYICDLQDYFKDNGGYVPLGRVTLNKWTALQKSNNRDAEINRIIKELKINSVSIQNIEYEYNNFANNFKEKKDENGKIVKNNAGNIIWDLKADAKSVIEICQFFKYKQVPINARLNLAKRLEKSIDFLSEFGVSKSPALDYKNDKNNFNLTNYPLKIAFDYAWENCAKAKHEEIPFPKEQCEKYLKDVFDIDIECKEKCQNKECKGCEKCRGYYLNKYADLIRFKILLGRLKAEFHKTDEEKNKSNIQELRNIFRDLDYRGDKRLNKNEIQKAVNAWFDNKEQSIGRKKEDEIHLMENEKNKFSLSMQIIGQERGGLKSRISKYKALTEMFKVCASKFGKQFADLRDYFNEAYEVDKIKYRAWIIEDEKQNRFILFVNKEKEVDLTSEEGDLYFYEVKSLTSKSLVKFIKNRGAYPDFHKINNRQIDLNSGEKDSRGNFIDDVKIHWSTYKNNQKFLDKLKDCLQNSTMATVQKWSEFEFEFDFSNCDTYEKLEKEIDRKGHKLERKTISLTTITNLVENTACLLLPIVNQDLNKGNKQAKNQNQFTKDWFDIFENKKRLHPEFNIFYRFKTKDYPNTKFKNGTEKTKRYSRFQMLAHFGCEVIPQGDYLSKKEQIAIFNDDKKQTEEVKKYNKNISSDVDYVIGIDRGIKQLATLCVLDKNGVIQGGFQLFTRTFNSETKQWEHQELEKRNILDLSNLRVETTITGEKVLVDLASIQTKNGENRQKIKLKELAYIRDLQYTMQTRASDLLDFASKINSADDITENNIKNFISPYKEGEKYADLPQKEMFDLLTEWKNAEEEGKRKIAELDPADNLKSGIVANMVGVVALLCAKYKYRVRIALEDLTRAYGIQKDALSGATIFQNDEDFKEQENRRLAGVGTMQFFEVQLLKKIFKVQIDKDLHLIPAFRSIANYEKIVRRDKQNSGDEFVNYPFGIVCFVVPKYTSKRCPKCEKTNVNRKENIVICKECGFQTKEGNPYEKNNIHFITDGDQNGAYHIAKKAL

SEQ ID NO: 62 - protein, 906 aa, Unknown
  metagenome-derived sequence
  MISC_FEATURE (1)..(906): Unk14
MEKNYKSEINLSYEDILNKFNLLGRAIDIANDFKNSNNQNNFSLDEYPIKLAFDYAWENTARSLKRTIPFPKEVCKQFLKDNFDVDIDNADFKLYANLLFIADNLATIEYNNPNNEVELINEIKQAFECISFPFDKEVYKGHKEAILELLDKEKSQRDYSTILKAKQELGLLRGGLKNKIKKYRDLTQRLIDKKNSHFGIASFVGKTLATIRDGLKEENELNKISDYGVIIEDSNQDKYLLTLELNGKDIRDRIRNSLGNGEYKTYEVNSFTSKALNKFIKNPLSEDAKKFHGKYKDEYSFGYENKDGDFTYKITKVSKYDEQGKWTGYQESFLSHIKKCLIDSEISREQNWEAFGWNFAGCNTYEEIEKEVDSKGYQLTENLISMGNLKSLVKDEGCLLFPIINQDISSQKQENKNIFTLDLEKVFEGKECRIHPEFSIFYRRPIEEHKKENKSGIINRFGRLQLLANLGIEFVPRNPSFKTKKEQNRIAIDQKKQNQLVQEFNQKKVNTYFEGLDNYYIFGIDRGIKQLATLCVTDKDGVIQDFDIYTKHFNSESKKWEYKFHRKDGILDLTNLKIESDRSGNKYIVDISLFQAKDEDGNPTGTNKQNIQLKQLAYIRKLQYQMSANEEGVLNFLGKYKNKEEREQNMEELITPYKEGKNFADLPMDIFQEMFENYYRLKTDQNLSESEKKNLMKITTELDASESLKKGVVANMIGVIYYLMKKYEYKVKISLENLSNAWLFSKDGLSGDVVLNTKNDETMDLKKQDNLALAGVGTYHFFEMQLLNKLFKISTEEGVLHLVPSFGSVKNYIEIMKIKGKYVYKQFGIVYFVDPRNTSKKCPVCGKGGKKYISRVDNVVTCKNCGFDTSSDNSILINNYKKQGKNIHFIKNGDDNAAYNIGEKIR

SEQ ID NO: 63 - protein, 918 aa, Unknown
  metagenome-derived sequence
  MISC_FEATURE (1)..(918): Unk15
MIEPGNYVYLRQILKNIKLEQKNKFSKLMQSKSLTFHDLNNNNQLYLFKDILEGEFNKYKQKTNEIETKAEKRNQCNNDELKRKLNSELQQLRKDRGSLINAADGRPKGRFKTYKYFANFYRNVAQKHGRILSTLKGIEKEMVESQLLKYWTIITEENNQHSLVLIPKERAGEYKKDLENSIPSDPSSKIKVYWFESFTLRSLRKLCFGYVNNNTGSNTFYPELKKSDELRKYHDERGNFIKGEFYFKGDEQKIIQFYKDVLRSNYAQKVLKFPKQQVKDELIGREFSSLDEFQIALEKICYQRHVVCSQKVVDALSRYNAQIFLITSLDLGNPANCVDKPKQFSHFDKKHTRIWKEFWSSKNETANFDIRLNPEIVITYRQPKQSRIKKYGPESTRYDDRKHNRYLYPQFTLITTISEYSNAPTKALSFLTDEEFKGAVDEFNKKFKKENIRFSLGIDNGETELSTLGVYLPVFKKDSNEKVVAELKKVNKYGFNFLTIKDLSHVEKDKNGRVRKIIQNPSYFLSKEQYMRTFGRTEQEYNNMFAEQFEEKAFLSLDLTTAKVINGHIVTNGDVPTFLNLWMRHAQRDIWDMNDHTKEKTAKKIVIKNNDELTDAEKVKFVEYISDETNYAKLNFNEKKRYVLWIFENRKNINFTDAEKKKFEPCQKRKGNFSKDILFAVCYIGSEIHSVTNIFDVRNIFKMRKDFYVLKSEMEIKKEIESYNTTAGIQEISNEELDLKINRLKQAVVANAVGVIDYLYIYYKKKTGGEGLIIKEGFDTKKVAKALEKFSGNIYRILERKLYQKFQNYGLVPPIKSLMAVREEGIENNKDAILRLGNVGFIDPTGTSQQCPVCSKGKLNHTTKCSKNCGFNSKNIMHSNDGIAGYNIAKRGFENFISQKKGYDVINNGTKYNNLKSQ

SEQ ID NO: 64 - protein, 1011 aa, Unknown
  metagenome-derived sequence
  MISC_FEATURE (1)..(1011): Unk16
MDYQQYEFTRTIRFNLSGDDKRALMLDLLDDTQEGMLAAFQETYKNLLFAFQEAILRADGSGNLRVGRLEIKKSWLRQYAREYFYALSEDERRCKNKFQAKLFDRVLSDWLERNNELLQRLNNILSLPQESKTGASDLSLLVRQLKGAEYFYFIRDFTQSGIINDKDSDEHIKNLAGIVEKFETLLDKVLFLTAPNSSQGVETTRASFNYYTVNKISKNFDENIKKANGRLCSSYQNSMNEELLRKVGFLKYLKDEYRAELQNVSLKDLYEALKKFKSQQKTAFIQAVQKNKSEKELMREFPLFNGKQPDTLQKFILETDKIKRGAYFQKWGFDNYISFCNKIFKPVAMETGTRKAKIRALEQEKIEARLLQYWAHILVKDGKYFLLLIPKEKMGEAKVFFARLSDQEGGEYTLYAFNSLTLRALKKLIRRNLGKEQVRLSAGDADAIALCQEVLRGRYHQLKDLDLSGFEKEIAEIANTQYENEEEFRIALEQVAYYLSERKMNEESIEYLKKNLGAILLEISSYDLERNITGESKEHTRLWSDFWNPNNKKECFSTRLNPELRIFYRPPREQKDPKKQKNRFSKDHLAVAFTIAQNAARKRMETSFAEEKDLVEQVKKFNEEVVGKFIDEKSDNLYYYGIDRGQQELATLCVVRFSKEHYEAMLEDNFIKKFSKPIPAQITAYRIKDEHMSYRKNITRDLKGNETEEILFKNPSHFIDEVENFEEVSTPCIDLTTAKLIKGKIILNGDIQTYLALKKANGKRQLFEKFAKIDDSAKIEFDDSEGRFQVKSKATEREEYQFLPYYGPEQENISPREDMRRELQAYLDKLRSSESFEEDISIEKINHLRDAITSNMVGIIAFLFTEYPGIINLENLHSRENIEKNWRKNNEDISRRLEWGLYKKFQKIGLVPPRLRQTVLLRENETERQEKLNQFGIIHFIPTEKTSARCPYCGENTPMKQRNEDKFKLHAYICRSNEENCGFDTREPKSPLEFIKNSDDVAAYNIAKKRL

SEQ ID NO: 65 - protein, 1029 aa, Unknown
  metagenome-derived sequence
  MISC_FEATURE (1)..(1029): Unk17
MRKMFLSLANIVCEVLVPLCNGSICFPDIEKMSDKDENKYLREFAVDYKTKIDLFDSISELRKYFEENGGNVPFCRATLNPKTKIKNPSSTDNSIEAEIEKIGMEKYLQTTDEIITAINKIKQMQDSKLPLIKRALLFKYKTIPAVVQFDLAKSIGKKLNKEEQELRTIIRTIGQTASPAKDYADLQHKKEFNINQYPLKPAFDYAWESLAKAEYHNDIEFPNQICKQFLKDIFNVDTETDSYFKLYAQFLYLRELLATLEHSQPTNPEKIVKIIEELLEKINAWKEIDDKNSEKYKTAISNWLKTFNKEDNNFKNAKQKIGLFRGGLKKKAGDKSRWEYLRKPDEKEAPKLTAYNALTQIYKDIATNLGRNLADMRDKITNESELNKISHYAAIIEDKNGDKYVLLKKSDKDEEFALPCEKDAEYKTYIVNSITSSAIAKMIRKKRAADLAKNIRLKSEELNDEQKEAKNLKDWIELIKKQQYDFEFNLNLNNKNFEQIKKEIDAKCYQLQKGNISKQTLEKLINEQKEWLLLPIINQDLAKRDKSTTNQFSKDWQKIFSDKRCGYRLTPEFRISYRKPTPNYPQSQIGDKRYSRFQMIAHFLCDYIPQGNLEYKSTRQQIEIFKDYEKQEESVRNFTYKIYANNDYLIFGIDRGLKQLATLCVLNKEGKIYGGFDIYTRSFNKDKKQWEHSLSEKRNILDLSDLRVEKTITGEKVLVDLNSIKVKGNQDNQQKIKLKELAYIRKLQFKMQTEHGTVINFINKYRTPEEIQKNIHELITPYKEGEHYADLPTEKICNMLQKFKEFSDKNDGKSKRELIELDSAGELKNGIVANMVGVVAYLLEKYKYNVYISLEDLTRAYRRQTDGLDGRELFSSNDDKSVDFKDQENTALAGLGTYHFFEIQLLRKLFRIQQEDGNILHLVPAFRSVDDYEKIIRRDKKIDGNEYVDYPFGIVRFVDPKNTSKRCPLCSSININRHKNIIKCQQKACGFKTPWDKTNDKNIQYIQNGDENGAYHIAKKTLDNLNNKK

SEQ ID NO: 66 - protein, 1080 aa, Unknown
  metagenome-derived sequence
  MISC_FEATURE (1)..(1080): Unk18
MDRFKNLYEVKKTVRFELKPSRKKIFEGGDVIKLLKDFKKVQRLFLEIFVYKKKDSKLEFKKKREIKYTWLRTHTKNEFYNWSRRSDIEKNYVLSKIDFLPEEILRWLDEWQKLTESLEDITQTEEHKQKRKSNIAFALRKFSKRQNLPFIKDFFNAVIDIQGKQGNESDVRIKEFRGRLKEIEKNFNACSKKYLPTQSNGVLLHKASFNYYTLNKTPKEYEDLKKEKELELNGVLSWAIYKRERVIDRRTEQTEILFDCDIDWLKKIGLGDEIQNWVLDEAYQKMKIWKANQKSDFIEAVARDKLTFQNFRKKFPLFDASDENFEICYKLTKELDKKPKDAKKVAQERGKFFNAPKEKIQTKNYFELCELYKRIALKRGKIIAEIKGIENEEVQSQLLTHYAMVAEEENKKFIVFIPRKNGEELENHKNAHKFLQGKEKKESGDVKVYHFKSLTLRALEKLCFKKTKNTFAPEIEKETNPKIWFPKYKQQWNKTPEKLIEFYKKVLQSDYSKKYLDLVDFGNLNTFLKTDFTTLEEFESVLEKTCYTKVPVYFSKKEFETFKDEFEAEVFEITTRSVSTGSARKENAHAKIWKDFWSRKNETAGHTIRLNPEVSIFYRDEIKEMSNASRQNRTSDVNNRFSDPRFTLATTITTHADKKKPNLAFKKIEDIKNHIDSFNTVFNRDFSGVWVYGIDRGLKELATLNVVKFSDVKNKFGVLQPKEFAKISIYKLSDEKAILKDVGGKSLKNAKGEDRKVIDNISEVLEEGKEPDPILFENRIVSSIDLTQAKLIKGHIITNGDQKTYLKLKETSAKRRIFELFSNAQIDKNTTISGNKTIMLGKNNTIYWLCEWQRQNPWRDKKESLMQSLKDYLQNLDIKNHFKDIETIEQINHLRDSITANMVGLLFHLQNKLKIHGVIALENLDTVQKKSDSKMIDEHFEQSNEDISRRLEWALYRKFANTGEVPPQIKESIFLRGEFKVCQMGILKFVEVGGTSRGCPNCQSEWNQECGNQCNPKCNKCTENDSYKKNKRKNVYICKDDNQCKFSTEESRNLLEQNLHNSDDVAAYNIAKRGLEINSI

SEQ ID NO: 67 - protein, 1085 aa, Unknown
  metagenome-derived sequence
  MISC_FEATURE (1)..(1085): Unk19
MEKYKITKTIRFKLLPDKIQDISRQVAVLQNSTNAEKKNNLLRLIQRGQELPKLLNEYIRYSDNHKLKSNVTVHFRWLRLFTKDLFYNWKKDNTEKKIKISDVDYLSRVFEDFFNEWETVIERINTDCNRPEESKTRDAEIAFSIKKIATKQMFPFIKSFVYNSNYKNSEETKSKLTALLNEFETVLKICEQNYLPSQSAGIVIAKASFNYYTINKKQKDYKGYTDDIEKIEKGMNSKFHYERKYDQLLEELNLIALKELPLIEFYSKIKSYKSTRKIEFSEAVSKGLAFADLKSKFPLFQTESNKYAEFLELTGRITQISTAKSLLSKDNPEAQKLRDEIKKLRINRGEYFKNNFHKYISLCNLYKKIADKKGRLKGQVKGIENERIDSQRIQHWALVLEDNLKHSLILIPKEKVTEVYRKVRASKADSTSSSSSLYYFESMTYRALHKLCFGVNGNTFLPEIQKELPEYNPNKQSDFGEFCFHKSNTDKEIDEPKLISFYQSVLKTNYVKDNLNLPQSVFDEATVQTFETRQDFQIALEKCCYAKKTIISETLKKEILEDNNVQIFQITSLDLQRSEQKNLKAHTKIWNRFWTKQNETANYDLRLNPETAIVWRKPKKTRIDKYGAGTSLYDPKKRNRYLHEQYTLCTTVTDNALNNEITFAFEDTKKKGTEIVKYNEKINQTLKKEFNKNQLWFYGIDAGEIELATLALMNKDKEPQLFTVYELKKSDFFKHGYIYNKERELVIREKPYKAIQNLSYFLNEELYEKTFRDGKFQETFNELFKEKHVSAIDLTTAKVINGKIILNGDMITFLNLRILHAKRKIYEELIINPQAELKENEKEYYLYFDKEGTEKVEKIYRSRLDFEHIKPYQEIRNDLNAYFKNVQKNEAKVEDQINQTRRALVGNMIGVIYYLYQKYRGIISIEDLKQTKVESDRNKFEGNIERPLEWALYRKFQQEGYVPPISELIKLRELEKFPLKDVKQPKYENIQQFGIIKFVSPEETSTTCPSCEKKAYELQKEKKGEEKPAENKRYEADKKAGVFCCPKCGFHNRTNPMGYESLDSNDKVAAFNIAKRGFEDLQKHK

SEQ ID NO: 68 - protein, 1087 aa, Unknown
  metagenome-derived sequence
  MISC_FEATURE (1)..(1087): Unk20
MDSIKKDPKEAMPRFETVRTVRFELKPSADTLEKLKAVLPRGDFQVDIEKFITGLRKFYSGLADIIIDKSEEGFALRRGIEIKYGWLRSYTKNDFYTFIEGGDGRLPIKYGISDVGYLKRELQRWFVEWKEIILELEGMIQAPLESQRRRRDFAQLIRGLKKRQNFEFIREFSKALCNTNDPATDHLIEDLRISINSLEGELQEVEAAFASSQSAGFQIARGSFNYYTINKDPKSLKTEEKEERDKLNRSLSSFKDKFGSQEFFLSGKFSFIDAATGEGRKEDSASWTLEESYGKLKEWKSGQKKKFLEAIQAKIITVGNFSSKFPLFESSKEDFLAFLDLSERMAEANKKKSREENEGRKKEIDKGIKQLAQQRGEFFNKPGKRVQTRKYYDICQIFKNIAFKRGGIVARISGIGNERRESQSLQYWALIMEEQKKHFLIMIPRGESENYKKARESIEKRLAERGEIKIYHFKSLTLRALEKLCFKEIGNTFAPELKKQGVRFPRYKQEWGGQEERMVKFYQEVLTSSYAHNLLDIAEFGDLQSLLKKEYKSLVDFRSDLEKAAYLKKEIYLADDEKESFLRNYDALVFEIDSYDLRIESENRPENKGHQDKAHTRLWKDFWTSQNKEIGYGTRLNPEVKVFWREADEELSKSLSSGKISQPRKLDYFRNRYSRNHFNLAITITSNAIERKNDLAFKSISDIEKYIQNFNDDFNKNFKGEWFYGIDRGLKQLATLCIMRFSKQSYPINGKSLSCPEFSRIEAWQLKDENYSEDVKREDGTQFRRSAIKNLSYFLDKAELFEKKMVSCIDLTTAKMIKGKIVLNGDLMTYFKLKEHASRRKIFSLFSESKINDSSEIKISKSGSTIVIKDNCQEYQPIYWISQRQEKKTKGMYREIETPEQIIKKLDGYLKDIGRNNINEDIITVDKINHLRDAITANIVGVVSHLQGLFPGIIAFEDMDEEDHISKHFTQSNENISRRLEWAFYRNFQVKGLVPPQVKSTIFLRKEFKDKQFGIVQFVKMENTSCNCPRCGEKFPKTSDHRHYICGNPGCGFSSLGNRMEFSPLDDSDKVAAFNVAKNAFNKLYEI

SEQ ID NO: 69 - protein, 1104 aa, Unknown
  metagenome-derived sequence
  MISC_FEATURE (1)..(1104): Unk21
MKNYKLTKTIRFKLEADEKNISDIKKEIKSIEAKSNEFELANFVTELNNYIANIKAYLFYQRKDGLSAIKDKMTIKNEWLRQYAKQELVEFKVKTQKSNYTGNKRREQITISEISELSQKITKAFDELVVIYTELADSASLELNERARKAKIGLLLKRLCAKNTLPLLSSLIDNTSDKNETDDLSIRLKKQAIKINAQLLVGIRMYLPEQSGGLPITKASFNYYTINKKPVDFKERIEDLEKKLEVQDLEKLNIYFDKKKRTEKDYLEKKIFKLLEADVQKSLPKNQTLCLGEAPMIKTDSVSLRQFLKNIKAEQKKQFSELMQNNIPYEELEKSNLYLLNNIKSEQFTAYKEKTKKLEEIATKLSNQNLSEDVKKKLRSDKEKIAKERGGIMKDNFFAWKSFANFYRSIAQKHGRILSQLKDIEKEKAESQLLKYWALIVEENNTHKLILIPKEKAGECKKWLETQIYIQSTNNPKIIWLESLTYRSLRKLCFGFVENGNNEFNQNIKDLLPKDENGYTIKGEFDFKGDEQKKIKFYRRVLSSKYAQQVLDIPAEQIEEDIIDQSFDSLDDFKIALEKICYSRHVVCPSDIVEKLKHYDAQIFEITSLDLKNPENVKEKQDRFEHFDKHHTQIWKNFWTGENEKNNFNIRLNPEITITYRQPKQSRIEKYGEQKSDKKNRYLHPQFTLITTISEHSNSPTKILSFITDEEFKTSVNKFNKNLKKENIKFALGIDNNEVEFSTLGVYFPAFAKTTNEEKIAELKQVKKYGFEVLTINDLNYKETDYNNKERKIIQNPSYFLKKENYMRTFNKSEQDYEKMFAEQFEKKHLLTLDLITAKVICGHIVANGDIHTHFNLQMRDAQRLIYKMNDHTQEETIGRIKDFKIKETEAKNKVYVNIDANFIDGGFKSVFEIRPEFSNIKLKEEILSEIKTFNTRSISNEELDLKINHLKRSIISNAIGVIDFIYKQYKERWGGEGLIVKEGFDTKEVDKGIEKFNGNIYRILERKLYQKFQNYGLVPPIKSLMAVRADGIKGDKKAILRLGNIAFIDPTGTSQECPVCSEGELDHTTTCSKNCGFESNGIMHSNDGIAGFNIAKRGFENFY

SEQ ID NO: 70 - protein, 1122 aa, Unknown
  metagenome-derived sequence
  MISC_FEATURE (1)..(1122): Unk22
MSTIITAKQLEALADIYQTRKTIRFNLLPVSLSHKKTSEDEFKIALGQLIENYKQVVNNFNDTVFSCENEIEILNPRIKINCRWLKVYTKQDFYQNALRLKNKNIDLGEADFLLEIFQEWSKRNWSEEVCTEIEKPGILNEIEELKNQPLNCQKRKADFAYWVHQLQTRNNFPFIHELFENINDEMGGENDERIANTKKILDICEGCLKKIDDYLLPSQSLGQEIERASLNYYTINKESKYYENEIKNKEKTLEEPPTSLRFYKDTNFLKNISKDLPFFIESLNKSIPENAKFIASVGDPNKAENWSLAQAYQILKFYKGKQKSNLMEFVSQKPSFSELQKEKGLSLMKKIKDKRRSNEQVFQDFITLAKEIEQLGTEKFRLDINSENYPQQSIALRKKIKETTQKRNKYFIYNFTEYIDFHKGFDEIAKEFGKINADIKGLKKENIDAERLRSWAVILEKNSQHYLMTIPKKDGKLPEAYREIKSLRSESGENLWTLSVFESLTLRALDKLCFKKIDNTFIKSIEKELRGKCPEYFKRGKFMLKSEFKDGQPPAEFYQAILSLETTESVILVNEYLRDEKRDILLEKKFTSLQNFQSEMEKICYIRKEIKISQATKEHLEQKYDADTYQITSYDLEKERQNPEEHTKIWKRFWNQNKKSGYVTRLNPEMIINYVEQRIGSIKDKGEKEVKRNRRKQAEYILALTITENNDKPKTDMALASKDAVKKDIEKFNTERNLILSNDPYSFYYYGIDRGQKELITLGVFGFENQDIAVSGWDKNGSLISKNYKKPRPVTIEAYELPQEKFLEEIEYTVSNGETRSFDAYKNISLCEHLLVRKDVDSCLDLSCAKLIKGKIVVNGDISTYLQIKKTAAMRYITDGLAQHQFTNVLIQEREGTLCLEEEKRGITTLVELYHFDSRFDNLVDRANLKTELQEHFDKIREENSQGDIYTIEKINHLRDAICANAVGIIVHLLQKYPGLITLEDLDIEHKSREFSKYYGDVGSRIEIAFINKLQTLGLVPPSCKMVIGMQSKKEINQLGIIHYVKTDGTSGDCPHCGQRIDKKTKDTNKWGKHQFKCDNNGKSCGFSTYEDKDHKELDFLKNSDDVATYNIAKLGFESIVV

SEQ ID NO: 71 - protein, 1130 aa, Unknown
  Metagenome-Derived Sequence
  MISC_FEATURE (1)..(1130): Unk23 Csm1 protein; Xaa=Gly
MMNNIENKNLYEVRKTVRFELEPQFKFNYENKDIVNNNFDLNNFIDKYSSFLKLFNEIVFNFNXEKLNXKLKIKYSFLKSYTKNQYYDNKIIKPLKLVNQVEIXSSKKFEYLFQTFSELYKNNFDILNNIKELSQRSLENQSRKSDLAVYFSELSKRTNFVFLYELFNNSLNIENDEVSVKIDKANILTKEIDELIKKIKKSLLPTEVIEKLSFNYYTVNKRKKDYDKEIENKINDFSIQLKDFNPILSITHSXFKNYISDIAEKSTLLTIVDXYNLMKKYKAEQKSNFLKYLYSKSRNEDCDLNIDLFSDILIKPEFNEILDLTKAINILSQVKTDILNLKEANDKNKKNFEIESTLEKYNNNFXTDFXKIERDNFFEKITKLKKLRXDYFFEXNKEKFKFNDYKIFCSEYKKVAKEYXNIKAKIKALQKEKIDAEQTQSWALILEENNNKFLLTIPRDNTNNSENLSEANKKIKYLPSDKNXDIYLNIFDSLTLKALDKLCFXKENNTFRRTIYFNKAEYPEFFNDKXFLKDKFEFSNLVNXQKINDEKLLIKFYKSVLALESTKRQISLKFFTXIEDFLQTNFDTLDEFQEELKKVCYTIIRKTITKQTKDEIINNYQTKLYKITSYDLKKYDEDFIKTLKYKSDLKRKKINNHTQIWLDFWEKENKNNKFPTRLNPEIKISFTQLNLKFIQSNSELFTNRHFGNRLILTSSFTQNAFXKDLDLNFKETQDISNFYEKFNNNFNKNIKPTLKYSYXIDRXENELVSLXIFDLSKDKPEEKXVKIPVYELKTDKFFAYTKTTSTGKNMFPYQNVSYYQYEDFPHYYNEIKYVSCLDLSTAKLINNKIYLNXDIQTYLNLKIVSAKRKIYEIISKSQHKSESLDYDDYNTMIYIDXIKGKNKHIYKHNSKYESILSFDFVKDELKKYIIKVKVDLNDNEEVSIQKVNHLREALCANMVXIIDFLQKIYPGMIYFEEKNEDDRINHFNISNSSLGSKIELKLLQKFASKNFVTPVYKQILTIKDNKKYNIKQLXIIXYVDEKNTSDSCPICXSKLFXHXSFEFENLMHHYTEKYXYNYXDSLDKAKKTTYDICDYHMNDKNYXYFFINSXDDLATYNIAKKXIEYLNSKK

SEQ ID NO: 72 - protein, 1166 aa, Unknown
  Metagenome-Derived Sequence
  MISC_FEATURE (1)..(1166): Unk24 Csm1 protein; Xaa=Gly
MENNNMFNNLKNLYELRKTIRFELEPYIIKRNLIPDNNVNENLLKEFYNSYKDFINLLKKNFFNDKNIIXEEDKDIENKPFANLFKKAXINIEXNNQSXNQDIDKDIYDNYEWYNTIQFKYKWLEEVFLNEWIDNKEKIKYKNGEKKQKNYITFXDLXENNFVKKFFIKFFKDTDSNLKSLEQYLNNXLEDQTRRSDILFLIQSINSRDYLXKLYILFKKDNIDHKNDYNIIKEMKESILQLEKLIKQLLNKLKPSQAFXLPIEHISLNYYSVNKTPKEIDDEIKNELNKKNNIDKKYIWTFEDKDNLKSMFFKSTDKELEKELEKELNQEMSLKELKQKIKLFKAKQKAGFLELLQQKTPFKNFTKPFDFKFMGESFEKFNLVLFSKINEDTYNKMLKLTEEIEKENNKAEIKKLKLKRXKFFQRELKQFKGFCDAYKKIAQKYXQANAKIKSLKSQKVDAEKLRXWXFLSQKNNDYFINTFDIENSKNVFTKEIKNLKENXKDVVIYILSSLTLRALDKLCFKKDSSFIKELINNIDDKFINTNNKYKKLKSKKQLLEELEEXELINFYIEILEKQKTLNIKYRTEKSLDILKSSKNLEEFEINLKLETYHFISKKISEETYNRILKEYKXNSYKITSYDIKRXKQTKKYTTWWFDFWKKENKYNKYITRINPEMTISFKEKDKNFIEDNPDKKRNRKFKNRFILATNFSFYADKYYIDSAFINEEKRKNSIDSFNKLFNQNNKLKYIYXLDKXTKELITLXIYEIKXEELKPVNISVKIPLYKITKKXFKYFEEIENKNXEKKKRYLAKNVSYFIKDLENKELFEKLEINSCLXDLTYAKLIKXNIILNADIFTTLNFYKITAKRFLNDAITKXKIEXEKVFYIEKNKNFYYNYENRSEIEKKVIIYRKEEFDYLPYNEQYYNSLIEEIENELNSYIKKIQSSLNNSKKHHDNEDISIQKINNYKNAISANIVXIIIKLQEHFNXYICFETLDEXQIQKKXLKTFIGNIINEKIYNRLQLNLEVPPILKKFRTDVXNKKIIQHGKVIYINESNTSKACPICNKTLLEVDKNXILKEKDGKDDNKIYKLYXHLKRKNENKMRHLSDNEKFQPXKIEINXKIEKICDYNMEKNNYXLDFIKSXDDLATYNIAKKALEYLNSKTNN

SEQ ID NO: 73 - protein, 1167 aa, Unknown
  Metagenome-Derived Sequence
  MISC_FEATURE (1)..(1167): Unk25 Csm1 protein
MENFQIRKSLRFKLESNENNNLINETTNQLSTRQDFDLSNFSTKLDNFLNDLTDYLFYEDKQGDLIIKKYLILKNDWLKTYAKQQFFICKNSKQTRGNQRVQFTIEDCELEDMITEVRENVYDICDELYERSRADLHERYKRSGIAVLLNRLNTKDNLPFLVDLVKLSIDKKETSDLSIRLKSAGEELLNLLKQAIEHFLPEQSSGMCITKASFNYHTINKKPIDFDKEIKNVESSLLTSRQAQERNKGGIDNNVWKTAWIDINIKANGLPLCLGDSPFMEVDSYASLRQILKNILATQKSQFQEAMQRGDSYRELKESDLYLFNNISEDEFNKYFEYTEEIEKLATKRNQTHDYKLKKDLASKIERLKRERGSLISEADRRNTNYFRTYKEFAKFYRKVAQSHGRELAKLLGIEKEKVESQLLGYWAMIIEEKGEHKLALIPRKKTNDLKRRLEESKNSKEEVKLYWFESFTYRSLQKLCFGNLETNTNTFYPELRKDGALLRKFSLQDRNGYPKFISGEHEFKGDELKKIDFYQSVLASDCAKNKLNLPYDEVYNNVVNKQFDNLEDFKIALEQVCYKRCITTNKHLIDNLASEFGAQIFDITSLDLRRESNTKDKAEKYTYKEKRPTELWREFWKEENEEKGFDIRLNPEISIIYRKAKESRIEKYGADSKKNNRYLHDQYTLVMTFNEHCNTPTKNLAFANINDEQKVIEEFNERFKKENIRFALGIDNGEVELSTLGVYFPEFEKESIEEKLAELRNVEKYGFDTLTIKDLTYKETDLKDKDKKIIENVSYFLKEDLYCRTFGKTAKEYKEMFEKVFEKKRLLSLDLSAAKLVCGHIVTNGDVKALYNLWLKHAQRNIYDMNDHSKREGLKKVDFRYSEDLNTEERRIFIAYLNEGNDKYNKLSKEEKNAYVDWLYEAWADNEIENKKFYNVYKEQKIKGDYLHNVLLGATYIGEELQGVEEIANIDHIRHVFKFREDFEKIFTREEIKKAIDSYNKREISNEVLDLNLNKAKSSIVANVIGIVDFLYKYYKNRFGGEGIVVKEGFGISKVEGDRMKFSGNIYRMLERKLYQKFQNYGLVPPVKNITEFRGKDNAFVEFGNICFIDYSGTSQRCPICEKGRLNHTETCSENCGFSSKNIMHSNDGIAGYNIAKKGFREITKK

SEQ ID NO: 74 - protein, 1168 aa, Unknown
  Metagenome-Derived Sequence
  MISC_FEATURE (1)..(1168): Unk26 Csm1 protein
METYKITKTIRFKLEADEENSIHIKEDIINIETNDNEFTMVDFVSNLGNYIKDLKNYLFYEKKDGSLSFKDKIIIKNEWLRQYAKQDFVELKSKKRINLRNNRMEQIKIGDIPRLSSKIEEALDIAKEIYSKLSDDATLEQHERTKKAQIGLLLKRLEAKNVLPLLMDLVKETLDKDETDDLSIRLKRQSQKINSQLKIAIRSFLPEQSNGLQIAKASFNYYTINKKPIDFEKKIEDLKKNLNVKDLEKLNVYFDKKEKKQKNYLGKKIFSLFETDIQKALSKNQPLYLGDAPMIDSAYVSLRQIFKKIKSEQKKQFSELMQNKCSYDELKNSNLYLLNDIGLEQFNTYREKTKELEELATKLSNQNLLENAKERLRSQKEKIAKERGNIMKDRFQTWKSFANFYRTVSQKHGKILAQLKGIEKEQAESQLLKYWALICEKENQHQLWLIPREKAWECKRWLETVNDTSIDNENSIKLYWFESLTYRSLQKLCFGFLENGNNEFNQNIKDLLPKDRIGNTINGEFAFEGDEERKIEFYKTVLNSKYAKQVLNIPFKQVEEEIISQSFENLSDFQIALEKICYRRFAIYSNYIISFDAQIFDITSLDLKNNEKNNLNTHTHIWRDFWKDENEKNNFDIRLNPEITISYRTPKQSRIEKYGEKTKEYDPNKNNRYLHPQFTLITTISERSNSQTKTLSFIEDEDFKKSINEFNKKLKKDNIKFAFGIDNGEVELSTLGVYLPTFEKETHEEKIYELKQIKKYGFEVLTITDLKYKETDYNGNVRKIIQNPSYFLKKENYIRTFSKSEQEYEEMFAKLFKKEHVLSLDLTTAKMICGHIVTNGDVPALFNLWLKHAQRNVFEMNDHTVKETAKTIRLRNNEELTDNEKEKFAEFISDGKKFAKLTKEGKKSRYLKWIFEDRKENSFTEDENKKFNDCQKKKGKYNSHIIFASRFEGDELKSVTPIFDCRHVFKKRKEFETIRPIKEIENEISRFNTNRTSHNISNEELDLKITDAKKALVANAIGVIDFLYKQYKQRFNDEGLIIKEGFDTQKVEEDIEKFSGNIYRILERKLYQKFQNYGLVPPIKNLMAVRNEGIKDKNAILRLGNIAFIDPSGTSQECPVCKEKSKEKHTNNFICECGFNSTNIMHSNDGIAGFNIAKRGFENFINEK

SEQ ID NO: 75 - protein, 1171 aa, Unknown
  Metagenome-Derived Sequence
  MISC_FEATURE (1)..(1171): Unk27 Csm1 protein
METYKITKTIRFKLEAKDENIPEIQKDIAGLDNNFDLANFLTGLNHYINDIDKYLFEKKKNGNSVINGKITIKPDFLKNYAKQEWVNFQEKNKLTQNATQNSRPRKERNSINEFTGLDEKIKQTFKEVADIYETLANDASAGLNERAKREHTGLLLKRLQAKNTLPYLISLAENSNNKNETDDLSIQLKNQSSKLEQQLAAGIREFLPAQSSGLPVAKASFNYYTINKAPIDFIKRIEELKKNLKVDDLQKLNSFFDKKSKKNKLYFHDNLFKLIQTDVQEQLKNNKILLLGDTSMLDIENYISLRQVLKNIKSTQKKKFSEWMQTDKNYDDLKKTELYLFKNISLDQFIDYREKTKELEELAVKINQAANGEERKSLISKKEAVAKIRGNIMKDKFEAWKSFANFYRSIAQKHGRILAQLKGIEKEQTESQLLKYWALVLESNNQHKLVLIPRENSGECKKWLEENDNRSSPGSRHIFWFESFTYRSLQKLCFGNLESGTNTFNKTIQNLLLKYSKGKPINGEFAFEGDEQKKIKFYKDVLQNQTTLNLPQEKVQMEIINKNFASLGDFQIALEKICYRRFIVLNSDAEKILLNKFYAQIFDIISLDLKNLEIINNKQEKYLHNDKRHTQIWKEFWTSKNEENSFDIRLNPEIIITYRQPKQSRIDKYGQNSKLSNRYLHPQFTLITTISEHSNSPTRILSFVTDEEFKNSVDEFNKKLKKDNIKFAFGIDNGEKELSTLVVYLPEFSKRTPEEKIAELKQIEKYGFEVLTINDLNYKESDYNGKERKIIQNPSYFLKKENYMRTFDKSEREYDEMFEKLFKKKRTLTLNLTTAKVICGHIVTNGDVPALFNLWLKHAQRNIFEMNDHIKDETAKRIILKNKLDTNKEKLKFAEYISHKEKFDEFSEVEQEKYVHWIFEDREKLDFTTKENSKFNDCTKRKGDYRTDILFASCFIGDELRSVTDIFDCRHIFKKHDEFYSIKSEKEIAAEIESFNTNRTSHDISNEELDLKIVDAKKALVANAVGVIDFLYKKYKERFNGEGLIVKEGFGTREVEQGIEKFSGNIYRILERKLYQKFQNYGLVPPIKSLMAIRSEGLKGNKKAILQLGNVCFIAPDGTSQNCPICETKMNNNHADEIVCKVCGFESKNIMHSNDEIAGFNIAKRGFENFN

SEQ ID NO: 76 - protein, 1171 aa, Unknown
  Metagenome-Derived Sequence
  MISC_FEATURE (1)..(1171): Unk28 Csm1 protein
MENATIKNPKYSYMKSIRFNLIDTDNKLSDLKSNSNQDSIINLDNIFSSYDKLIKEFKSLFFEVDKNKDYKRNNSENYILKRTIKIKKQWFKTYFKEGWNFKEEKKQEIEKTQTKINETVSKFENLCKQLRTDIDHDKNRAHKKHRNSNFSSILQQIKNKDVFYLLNDLVKQSINKNEVSKVNSLIKDFSSFEKKLNQLSKEYLASQSLGIELYRSSFNYYTLNKSSKHYLKQIEKKIQNYKDEKNKTHIEFQNNSIKVNDMKLQLTSKDLEVMENIKSELKIKFPLNLEESKYFMKLFKAKLKSDLFKDCQKNNEIKDYSCLFNENKKLKKIFDLTREIQNENEFKEIQNLKKDRGEILKSFENWKNFINSYRKISQDYGRIKTNIANYEKEKIDSQKLRYWNLFLKKDNQIYILFVPIEFRQDVKEKITNANTVNSPNKIFMIKSLTKRALHKLCFNEYGSFLNEMKKKKKETYNEIIKFKQKFREEFEQNKIEKLNQELIQELKKKKIKFENDELKRSKNFVGFMKNFENKKYGQFKKQFKEKIEKLNQKYTKQKEEKTTKILKEVLQSDYAKSRLDLKDFDLQKVYLAQTSNEFEEELEKECYKILPYYIDNKLLSELETLFKVFKCKIQSYDLDKRFKNETQTPKSLEKRHTREYWNEFWQKLNQSKIRLNPEIRVNYKEKDNEMERYLWKRYNVDKEKIKENKYGFNRNLQDKYIINFSFLVNTGKKFLDLGFADSNEIKHEIEDFNIDLNKKMKNPFFCGIDIGEVELASSAIYAFDDKHKYQFNNQKFIRPVIPDNLPIKCLRLKKEYYTKSRKPSKQKVNFKKIEERQIISNLSYFSDQEELFDEISPFALNLTCSKVINGVIIENADILTYLQYMKKLAKRRLFEIYSKGFLETDNKKHNFQDLKLDWQYPKESNKYKSNNLILCDKENKIVKAKIFTFIYEYEGIKTKNGEYEFDSMKDYFNKYLNKLKKIKKSNDNKIIKEDIPRINNLRDALVSNMIGVLNLFNKFVDLYVVLENIPNKNKQDEYLIKRLESALFQKFQTFGMVPPNVKNLIKIKKMLQTKEDKDSGKEIQIGNILFINERKTSQTCPYCENSDNNQDHEKGIFLCSKCNFSTNDKEKIHLTELKILKSCDIVAAYNIAKKGYQFIINGTKHKNIKSE

SEQ ID NO: 77 - protein, 1187 aa, Unknown
  Metagenome-Derived Sequence
  MISC_FEATURE (1)..(1187): Unk29 Csm1 protein
MEKYKITKTIRFRLDADNTAISAIVKDTEALEARGQGFKIKKFVNALGRFLSGDGVQKYLYDMSNEENCVFKRNLVIKNTWLKNNAKQEIAGMDLKRGLIIKDIKGLQDKIEEIYDKLWEIYEILYESAYLPLQDLARREGIGLLLKKLSVKNALPFIISFVEESNDKNEADDLSLRLKKQGKEILTQLEIGINEYLPAQSSGLPVAKASFNYYTINKTPVDFGEKIQELEKRLSVDIKKEISSFTGGIKTAIKNKIAGKKILLGDTPMFESENSVSLRQILKNIKSEQKAQFNKFMTTQNNPQLEEMKTMGWYLFGDITEGEFNDYKEQTKEIERVGAKINQCGNIKEKKELRSQLQKLKKKRGELISEAHKKGGNDKNFKTYKEFAKFYRKIAQRHGKILAQIKGIEKEKIDSAMLNYWAAVIELSGRHKLVLIPKKDENAKKCIEWLEDESKHKNGSCKIFWFESFTFRSLQKLCFGNLDSGTNTFNQKIQNLLPCDERGNLMNGEFAFKGDEQEKIKFYKKVLQSQKDINLPQKEVVDNVVGRKFETMDEFKIALEEICYIRRERLSANAESELKSKFNAQIFDITSLDLRNPVNCAGKPEVYHHNDKRHTEIWKEFWSLDNERRNFNIRLNPEITITYRKPKESRILKYGKGTEKYNADMKNRYLYPQYTLLTTISEHCNTPTKILSFMTDNEYEESIKAFNSKLKKEDIKFAFGIDSGETELSTLGVYLPEFSAESTELKDIEKYGFNVLTIKDLNYTETDYNGSDKKIVKNPSYFVDKSLYMRTFKKTEQEYEKMFAEQFEAKKRLSLDLSAAKVICGHIVTNGGVSEHFGLWLKHAQRTIFWMNDHTEKKTAKNIKLKDSSELTYDEREKFAEHISSDEKFKKLDVEEKKRYVRWIFEDRETLNFTEAENKKFGGYQKKKGDYRLGILFASCFIGKELESVTQILDCRHIFKKREEFYSLKSKEDIEAEIKRYNTDYTNHNISTEQLDLKFVNVKNALVANAVGVIDLLYKQYKERLGGEGLIAKEGFDTKKVEEDMEKFSGNIYRILERKLYQKFQNYGLVPPIKNLMAVRADKVEISEAEKSKIRENCKISKIDPENEIIKRNKTLILRLGSIAFVNDADTSQECPACGTKSKEKHVDNFICGCGFNSTGIIHSNDGVAGFNIAKRGFVNLMEHELR

SEQ ID NO: 78 - protein, 1190 aa, Unknown
  Metagenome-Derived Sequence
  MISC_FEATURE (1)..(1190): Unk30 Csm1 protein
MESYKTTKAVRFRLEADDAAAPLVAGEVAALTAVGQGFKIRRFINRLGEFLGEGVQEYLYDAEGKVKDNLAVKNTWLKSNAKREIAGMIAGMKLRRGLAVKDIKGLRESIEKVFNDVWDTYEKLFSSVDLPLHDLAKRAAIGLLLKRLQVKSALPYLISFVEDSSDKNETGDLSLRLKRQAKDILEQLEAGVYEYLPPQSGGLEVARASFNFYTINKKPVDFGKETEKLNNSLIVSAEEKVHRGINVSKEVKSAIVNDILDRSSGKKILLGDAPEHDGEGCVSLRQILKNIKSEQKAAFNEFMTQNPQFEALKGKGWYLFSDITENEFDDYRKQTKEIERVATQKNQCERGDKKKLLQSDLQKLKKQRGALINAANKKGGNENNFKTYKAFADFYRKIAMDHGKILARLKGIERERVESATLKYWAVVAEVNNRHKLVLIPRENAGACRVWLDGGGHRNGAFKIFWFESFTFRSLRKLCFGFVENETKSNTFYDEWKKELTDYRNVSSEIDLNVTPGDRKGYTEEELRQNEQRKIKFYKAVLGSGCAKRSLNIPTEQVRKEIVNREFKNLDEFQIALEKICYLRFATLSANAEAELKKYNAQIFDITSLDLKNPESAAGKAEKYEHSDKRHTKIWKEFWTAENENAGFEIRLNPEIKILYRRPKQSRVNKYGEGTERYNPNRKNRYLRPQYTLVTTISEHSNSPAKEVSFVSEKEYTDLIDEFNGRFKKEDIKFAFGIDNGETELSTLGVYLPAFKKDTKEERLAELSNVEKYGFDVLAIGDLNYKENDCNGKERKIVQNPSYFLNKDLYMRTFNKTEAEYGEMFARQFEEKRLLTLDLTTAKVVCGRIVTNGDVPALLNLWLKHAQRNIFEMNDHIKDKTGKKILLKDKLDTDNEKRKFAGYISHKDEFDKLSGEEKARYVQWIFEDRDSLNFTKGEENKFERCQEKKGDYRSGVLFAASYTGVDLQSVTDIFDCRHVFKRRGEFYSIKPEREIKQEIDSFNTNRTSHAISNEELDLRIVHVKSALAANAVGVIDFLYRQYRERFGGEGLIVKEGFDTKKVEEDMEKFSGNIYRILERRLYRKFQNYGLVPPIKNLMAVRAEGMRADEKNSKPDLGAIVRLGNIGFVNETYTSQECPVCGGNLNHEKVCPKNCGFNDKRFMHSNDGIAGFNIAKRGFENFLNEKHGGAQ

SEQ ID NO: 79 - protein, 1194 aa, Unknown
  Metagenome-Derived Sequence
  MISC_FEATURE (1)..(1194): Unk31 Csm1 protein
MESYKITKAIRFKLEADEKAIPAVMRDISALRKTGDGADIKAFAEELYELLGYIHDYLYDEKNDDDYIFKRGLTVKNTWLRDNAKDETSGQTLKRGLTIGDIKGKDSRGSDLQENIEKIFDEVVDIHERLESAINSPLQSLPRRASIGLLLKGLARKRALPYLISFLEGSDDKDEKSSVSLIAKKRAKIVTDGLERCIRHYLPAQSHGLPVAKASFNYYTVNKKEIDYKGTIEKLKKDLKVGSLKEDLNRIFDNLKASISKEVKTELLNDISSRLSNGSELFLGYAPAAGIENGNYLRQILKNIKSEQKAAFNEFMTQNPSIGAIKDKKLYLFSDISEGEFNAYKKLTAGIGDAAAKINQARNDGDKQRLRSELNKRKKERGELINAANRRNGNENNFKTYKAFAEVYRKIAQRHGKILAQLKGIERERIEYDMLKYWAVIIELGGRHKLVLIPEKRAEECKKWLETSDESNRKNGSVCWFESFTLRSLKKLCFGNLDSGSNLFNSTIRPLLPKDRRGEAMNGDFAFAKSAAERMPEASEQDILKEAESEKIKFYKNVLKGQKALNNLPEEEIQTEIVKKDFNSLEAFQIALEKICYRVFYSLSANAEQELKDKHGAQIFEITSLDLKNPENVKDKQEKYAHADKRHTRIWKDFWTAGNEKGRFDTRLNPEITITYREPKQSRVDKYGKGSANYDAGKKNRYLHPQFTLTATVSEHSNSPAKTLSFMTDKEFKESVDDFNKKFKKDDIKFALGIDNGETELSTLGVYLPAFGKGAATEEKIAELKQIEKHGFKVLTVKDLNYKETDRNGKERKIVQNPSYFLSKENYTRTFKKSAEEYEKMLAGVFEEKRILTLDLTTAKVICGHIVTNGDVPALYGLWLKHAQRTVFEMNDHGKAKTAKDIKIKPKLDTDKEKLKFAEHISKIKEFRGLTAEEKAKYVKWIFEDRKPGDFTDKEAETFSDCLKKKGDYRSGIVFASCYVGEELKSVTEILNCRHIFKKREEFYSIDSEEEITAKLEGYNTDRTSHNISNEELDLKITDAKRALVANAVGVVDFLYKYYKQNSGGEGLVVKEAFDAKKVEEDIEKFSGNIYRILERKLYQKFQNYGLVPPIKSLLAVRGEKEELRLGNVSFVKEEGTSQRCPVCGAKSDEKHTDRLKCQKCGFDSYGIMHRNDGIAGFNIAKRGFENFMKEERK

SEQ ID NO: 80 - protein, 1209 aa, Unknown
  Metagenome-Derived Sequence
  MISC_FEATURE (1)..(1209): Unk32 Csm1 protein; Xaa=Gly
MLESFKDLYEVRKTVRFELKPSKVLPKIKIKNIDENFINEFFSNYNKLLEIYEKVFFNNREINGKIKFSFSFLKTNLKKEYYELXIDKIKKSASVNKIKLEKIDNYEKLNSSFLSTLKKQNEYVNSFKEKIESPYENRSRKSELVLLIYNLKKRNNFPFIENAFNNVTAENIMVDDEIKKXNMLAKTISNQLVTIEEELLPQNSMXLVIERATFNYFTINKTPIDYDIAIKNKKNKYNEIIXKQNKLKNTYKKQSINEFIKYIIEDGFSKFENQIYEQNGKYIDTGRKXSSFNELTIENAYTLMKKYKSDQKTAFYEIIKKEKYNFLKSQNNKITITYNKDSFNDKKEEITVKLFNDISKXNFDKIAMLTKKIETLAELKNYLEKKEFNKFQEKINTLQEIININFNNDNEEEVENLVKRLNADRVLLKKERXTYFDKESNNFAFTKYKEFCEVYQEVAMTLXKAKADIKSLEKEKIQSLFLKSWALIVENKEKNQFHLLTIPKKNISKARNIILALKNXENNNNILYLFESLTLRALKKLCFXKEFSENRGDYTEKSSPFRKSIEENITNSDFDNINFYIEKQKKDGNNYRVLKQYYDFYINKEENKELDEELLIKFYKSVLQLPSTLEQIIIKNFPDYESFISKEFNNLEEFEEGIKRTFYIKQPLKIEEHKLNKLIKEYNWNLYKITNYNLIKNDLDEIKELKEKERFNRNHIKNHSKLWWNFWEKENIDNKYPIRINPEIAISFVKKDDNFYEENHNKLFKNRRFQDRFLLTTSMTEFATNKSIYLSYKELSELKNFYNSYNYNFSENFKXEYIYXIDRXDNELASLXLFRNINKNIEAVKIETYKLKNENLLFKEXTSNTPAYKNISNYIEKDELFEIKEVSCIDLTLAKLIKXKIVLNXDISTYINLKITAAKRSLYNIFSKXNYKEXDIIEKXKFKDKNTGEEXYDXTLKFNQKEIYKNNSEIEKIISIDKVKNILEEYIEEIKQNIYNEDISIEKINHLRDSICSNMIGIINFLQEKYSXYMFLENKKIIDSNKNFLKDXYQLGTRFEQKLLQKFSNLNLVPSNYKLFLSIRDEDKEIKQLXIIRYIDENSTSSACPVCNPKLYNVNSDDINKLYXHXKXEEKEKSMHHINDKNDENHQEXKWESXKLESXDLCDFHIXYNEKYPDFSFIKSXDDLATYNIAKKALEYLEYLKSLNNDETK

SEQ ID NO: 81 - protein, 1257 aa, Unknown
  Metagenome-Derived Sequence
  MISC_FEATURE (1)..(1257): Unk33 Csm1 protein
MDADKTTKAINEYQTQKTIRFGLTATNQNLYSEEIMKLLNISEERIIKEKVKVNNDTDKTNQLRGCLVQIKKYLKTWENIYAQIDFLAITKDYYKVISKKARFDFDKGNGSEIKLSSLQSTHNKKKRYQYIIDFWKENLRKTENLYRKSDDLLKIFEEAKNQNRDDKKLNKVELRKTFLNLFTLVNESLKPLIEGNLFIVNDDKIDEKNSKHNYVFYFISKTEERRLLYDNICTLQDYFKNNGGYVPFGRVTLNKWTALQKFNNRDIEINRIIKELKINNISTQKTDYKYNDFTENFKEKKDENGKVVKNSAGNIIWDLKANAKSVIEICQFFKYKKVPINARLNLAKRLIKDNKLKKEQENTFLSEFGVLKTPAFDYARDKENFNLTNYPLKVAFDYAWENCAKDKYEKIPFPKEQCERYLQTAFEIDATKDENKKLIDTHLNKYADLLQFKILLERFKAEFHKTNEETNKNNIQKLRNVFSGLDYHGDNRLNKNQIQKAIEAWFDNKEQNIGKKKENEKLLTENEKNNFSLSMQIIGQERGGLKNGIPKYKELTEMFKVCASKFGKQFADLRDYFNEAYEVDKIKYRAWIIEDDKKNRFVLFVNKEKAFDLTSEEGDLWFYEVKSLTSKSLVKFIKNRGAYPDFHDVKNSFHYSSIKKDWQNYKNDPEFLDKLKECLKNSKIAKDQKWAKFCWDFKQCDTYEKLEKEVDRKGYKLEGCKSEPKTISLTQLTDWVENKDCFLLPIVNQDINKGDKRTKNQNQFTKDWFDIFENKKRLHPEFNIFYRFPTKDYPNTKFKNGTEKTKRYSRFQMLAYFGCEVIPSGNHLSKKEQIAIFNNDKKQKEEVEKYNKSISSDCDYVIGIDRGIKQLATLCVLDKNGVIQGDFQIFTRTFNKQTKQWEHKELEQRNILDLSNLRVETTITGKKVLVDLSKIKDDEGNYTNLKQTIKLKQLAYIRELQYAMQTRPDDLLDFVKSINSANDITAENIKHFISPYKEGKNYDDLPKVEMFNLLKEWGNADENGKRKIAELDPADNLKSGIVANMVGVVAFLCENYNYKVRIALEDLTRAYGIQKDALNGTAIYQNDEDFKEQENRRLAGVGTMQFFEVQLLRKLFKIQVDKNLHLIPAFRSVDNYEKIVRRDKQNSGDEFVNYPFGIVCFVDPKYTSQQCPYCNNTHKHKKNDTETGKKAFYRNKGENKNSLLCEKCGVSTIEGEETLSSKNDNKKQFNIHYITDGDQNGAYHIANKVVINFQKDS

SEQ ID NO: 82 - protein, 1276 aa, Unknown
  Metagenome-Derived Sequence
  MISC_FEATURE (1)..(1276): Unk34 Csm1 protein
MEKIKNKYQVSKTLRFGLTQKEKRRKKGFVGEVYESHTELKDLTDFSVKKIRAEIKQGGNSGIPIEKIRQCLIVIRRYMNFWENIYYRCDQLSLDKDFYKKLSKKIGFEGFWHEENRKTDHRIKKPQARTIQLSELNKKDDHYKERKDYIVEFWESNINKAAERFKETESVFEKFEIAINANRDDNRPNEVEMRKMFLSLANIIYETLVPLCNGSISFPNIEKMQNNEENNNLRKFAADDEFRAGLLTQIEELKAYFEENGGNVHYCRATLNPKTVIKNPNSTDSSIADEVEKTGIERYLQNKQEIKNKIEKIKDKNLPLIERALLFKYKTVPAGVQFDLAKFLSVKLGKTEQELRTIIRCIGQIQSPAEDYAKSEDKKGFHLEQYPLKSAFDFAWESLAKAIYHKNVDFPQQQCKVFLEKNFDIKIDSNANFKLYAQLLYLRENLATLEHSKPTDPDTFEKNIRKLLDEINWSTIDKEKGSVYKNAISDWLKNKKAKDEKFGKVKQSIGLSRGRLKNKIKKFDDLTKDYKDIATQLGNAFAAMRDKITNAAELNKISHYATIIEDKNGDRYILLQKVTENEKPVGENWNKNGELKTYLVNSVTSAAISKMIRKIRTDELRKNEKMQSSITKLNEKQKEEKNINDWKNFIEEKRWDLEFKLDLKSKNFEQIKKEIDTKCYLFNTGYASQADIKQLVKEKDALLLPIINQDLASKDKIVRNQFSKDWQMIFSDNSQGYRLTPEFRISYRQPTSNYPQPEEKRYSRFQMIAHFLIDYIPQNNQYISTREQVELFKDETKQREAIEEFHKQLTPKTEAEQKAESLSALAAKFNNPNNKKQKNNASENKPDEKFYVFGIDRGQNELATLCVINQDKKIIGDFEIYIRKFNSEKKQWEHLKLENRHILDLSNLRVETTIVIDGKPEKKRVLVDLSEIKVKDKNGEYKNPDKMQTKMRHLAYIRKVQFQIQNNPEGVLDFLKKFKTKNETIYNLVDKENGEKGLISFYGAGNTNEDLPKDDIWKILQKFQELKNKTGDDNVKKEIKELIELEPVDNLKNGVVANMVGVIAYLLEKFDYQVYIALEDLTKPFNEDIKDGTTGVKGNYKGEGKRADVEKYAGLGLYNFFEMQLLKKLFRIQQENDNVLHLVPAFRAVKNYENLIAGKGKIKNQFGIVYFVDANSTSKTCPVCSSIPDKNNSNNKNAKGKKIINKKGNESVIWVERDKSNGNDIIRCYACGFDTTKNYSENPLKYIKSGDDNAAFIISTLGIKAYELAKTLVANK

SEQ ID NO: 83 - protein, 1276 aa, Unknown
  Metagenome-Derived Sequence
  MISC_FEATURE (1)..(1276): Unk35 Csm1 protein
MKSFENSCQISKTLRFGATLKEDKKKCKSHEELQEFVDISYKTMKSSATIAESLNEIELVKKCERCYSEIIKFHEAWGQIYCRTDQIAVYKDFYRQLARKARFDVGDQNSQLITLSSLSSKHNVYQGLKRSQHITNYWKDNIARQKSFLKDFSQQLHQYKRALENSDKAHTKPNLINFNKTFSILANLVNEIVIPLSNGAISFPNISKLEDGEESRHLIEFALNDYSDLVGSIGELKDAIATNGGYTPFAKVTLNHYTAEQKPHVFKNDIDAKIRELKLIELVEKLKNKTSKQIEEYFSKFDKFKIYDDRNQSVIIRTQCFKYKPIPFLVKHELAKYIAEDEDAVLKVLDAIGATRSPAHDYAHNEDVFDLKHYPIKVAFDYAWEQLANGVYTTVSFPEEKCREYLNAIYGCEVTKEPVFKFYADLLYIRKNLAVLEHKNNLPSNPEEFICKIENTFEKIVLPYKIKEFETYKKAILTWINDGRGHEKYTDSKRELGLIRGGLKGRIGAQKMFRKNKKGELIPYYENPYTKLTNEFKNISSSYGKTFAELRDKFKEKSEITKITHFGIIIEDNNKDRYLLANGLQHDNTDQSNTQVEAILGKLNTSLEFTTYQVKSLTSKILIKLIKNHTTSPNAKSPYADFHTSKIHVDWTKIKKEWDTYKSNHSLLQYVKDCLTNSTMAKNQNWAEFGWDLESCNSYEAIEHEIDQKSYILQKHTISKASIKSLVENGCLLLPIVNQDITSQGRKDKNQFSKDWKQIFEDSKEYRLHPEFAVSYRTPIKDYPKDKRYGRLQFICAFNCEIIPQNGEFINLKKQIENFNDEDIQKNNVAEFNNKVNEALLGKEYVVIGIDRGLKQLATLCVLNKRGKILGDFEIYKKEFVRTENRSKNYWKHTLAETRHILDLSNLRVETTVEDNKVLVDQSLTLVKKNRDTPDEKATEENRQKIKLKQLSYIRKLQYAMQTNEQAVLDLLKDNSDDEEFKKRVEGVISPFGEGQEYADLPIDTMRAMIQDLQGVIAKGNKQTEKNKIIELDAADSLKQGVVANMIGVVNFILAKFNYEAYVSLEDLSRAYNVAKSGYDGRYLPSTSQDPDMDFKEQQNQMLAGLGTYQFFEIQLLKKLQKIQSNNTVLRFVPAFRSADNYRNIIKLNPKYDNTEYVHKPFGIVHFIDPKDTSSKCPVCGKTGKKNVDRNEKKNNILLCKACGFRTVWELKQPENIKSEGYCFSEDEIQKTIKNNQKQMEIKKLSDKNIHYIHNGDDNGAYHIALKSVENLKHKE

SEQ ID NO: 84 - protein, 1297 aa, Unknown
  Metagenome-Derived Sequence
  MISC_FEATURE (1)..(1297): Unk36 Csm1 protein
MKSIVNNYQISKTLRFGLTQKTKIQKEGYNGEIYVSHRELCDLVKISEERIKKSVSASDKSNLELSIDIIDTCLKQIGVFLSDWQQVYYRKDQVALDKDYYKILCKKIEFDGFWKDDRGQRMPNSRIINISELDKRDSLGVERLHYILNYWKDNLVSASQKYSAVEEKIKRFKSAIKINRTDNKPDEVELRKMFLSLANIVCDTLQPLCYGQISFPKINKLDDSRTDNKKLIKFATEYKSKNDLLTSIAEQKKYFEENGGNVPFCRATLNPKTAIKDPNSTDNSIKGEIAQLGLDSILKSFKSYLFFENSLENMSAKEKIDLMKSDGASIIKKGLMFKYKPIPVIVHREVAQELSEDLNKTEESLSDFLRGIGQAKSPAKDYEELTDKNEFNIEAYPIKVAFDFAWESLAKAKYHSEIDLPVDSCKKFLKTFDVTPDDANFLLYAQLQELNALISTLEYGYPSDEQSIVKKIKALSNEIQWEKVSDRNGQEYKRSISDWADGKRDSDGFKIAKQNIGLFRGGLRNKIDKYYSLTQIYKKTVMDEGKIFAIMRDKIIGAAEQNKVTYYAAIIEDNTGDKYVLLQELPLNGQDRIYDKMTRDGDGYVCCFVNSITSRTIAKQLRKKRMAELKKNKAWGAYNDNVSNTQQPVLSDEEKEERNIREWKSFISEKRWDCEFNLNFKGKNFEEIKKEIDAKGYELENRRLSREALDELVKNNKCLLLPIVNQDIIKENKTESNQFTKDWNSIFDDNSPWRLTPEFRVSYRKPTPDYPVSSKGDKRYSRFQMIAHFLCDYIPNSDSYVSVREQIENYKDDKKQETAVKDFHNRLLGKTEEQKIIDRLGAFQGWGNVIIKKTKPEKQEGSKEKFFVFGIDRGQNELATLCVIDQDKKIQGGFKIYTRSFNSEKKQWEHKFLEERNILDLSNLRVETTIVIDGQEKKEKVLVDLSEVKVKDHFGNYVKPNKMQVKLQRLAYIRKLQFQMQTNPERVLEWYSHNQTNDLIINNFVDKQNGEKGLVPFFGAAVAELKDTLPIDRISEMLKQFVELKNLEKQGEEVKSKIDQLIELEPADNLKSGVVANMVGVIAFLLEKYSYQVYISLEDLSKPFENQIVLGISGVPIGINKGMAGRSVNVEKFAGLGLYNFFEIQLLKKLFRIQRDSCHILHLVPAFRAMKNYDNVAVGKGKIKNQFGIVFFVDAAATSKTCPCCGANNSKKFEPDFRKFPNAKKFETPDKKSVWLERDKSDGKDIIRCHVCGFDTSKEYDDNPRKYIKSGDDNAAYLISAEGVKAYELATTLVDNK

SEQ ID NO: 85 - protein, 1315 aa, Unknown
  Metagenome-Derived Sequence
  MISC_FEATURE (1)..(1315): Unk37 Csm1 protein; Xaa=Gly
MINLENFKNLYEVRKTVRFXLNQPNKKXDFKTHLEFKDFTEKSFQNVENELASNGKYNIGDEEQLIKKISAFVEQLKIQLXYWKVFYQRYDLIAINKDYYKILARKAKFDAIWEISKSNKYIKVKQPQASQISLSSLKIXNRSDSIIQYWXEIIEKTDYLLNIFKPKLEQYERAIKDANNAHIKPDSINFRKTFLQLLKLTKEFLQPLSDRSIIFEFSKKKVSKEIEKISEFAXEKNNTKIYNVLKNXEELRQYFEANXSQVSYXRVSLNYYTAVQKPNNFDQEIKKSIDDLXIINFLKKSDSQIIDYLHQGSKQKIKLLLTSKHPYPIELLQLFKVKPIPFSVKYNLAKFVEKNYKSETNLSYEDILNKFNLLXRAIDIANDFKNSNHKGNFSLDEYPVKLAFDYAWENTARSLKRDISFPKKVCERFLKDNFDIDVDNADFKLYANLLFIADNLATIEYNNPNNEAELINEIKQAFECMSFSFEKKVYEXHKKAILELLDKEKSQRDYSTISKAKQELXLLRXXLKNKIKKYRDLTQRLIDKKNSHFXIASFIGKTLATIRDGLKEENELNKISHYGVIIEDNNQDKYILISKLEGKDRRDKIVQKLXKXDIKVYQVNSFTSKALNKFIKNPLSEDAKKFHGKYKDEYGFXYENKNXDFTYKVKNVSEYDEQGKWIXYQEEFLNHIKKCLIDSEISREQNWTAFGWSFDGCNNYEEIEKEIDSKXYQLTENSISKGNLESLVKDEDCSLFPIINQDISSQKQENKNIFTLDFEKVFERKECRIHPEFSIFYRKPIEEHKKENKSXIINRFGRLQLLANLGIEFVPRNLSFKTKKEQNRIAIDQKKQNQLVQEFNQEKVNTYFEGLDNYYIFGIDRXIKQLATLCVTDKGXVIQDFTIFTKHFNQASKIWEYRENRKEXILDLTNLKIESDKNXNTYIVDISLFDAKDDNXRSTGTNKQNIQLKQLAYIRKLQYQMSANEKXVLDFIAKYISKDEREQNIKELITPYKEXKKFADLPMDIFQEMFENYYRLKTDQNLSEFEKKNLMKITTELDASENLKKXVVANMIGVIYYLMKYYDYKVKITLENLNQSFXXQVDXINNHYVDIKNNFMYQENQALAXVXTYHFFEMQLLKKIFKISTEEXILHLVPSFGSVKNYFKDIEKYSLIVNIXRNEKYNQFXVVHFVKPDNTSKKCPVCLNTQTTXKKEXMPIINRNYKKSNIFYCERCXFQSIHSHCQEENIKDSNDFHYSVEEVERIEMKNKEAIEKYKKQXKNLHFIKNGDDNAAYNIXEKIRELPKKSDVKNTSISXNISFS

SEQ ID NO: 86 - protein, 1276 aa, Unknown
  Metagenome-Derived Sequence
  MISC_FEATURE (1)..(1276): Unk38 Csm1 protein
MKSFENSCQISKTLRFGATLKEDKKKCKSHEELQEFVDISYKTMKSSATIAESLNEIELVKKCERCYSEIIKFHEAWGQIYCRTDQIAVYKDFYRQLARKARFDVGDQNSQLITLSSLSSKHNVYQGLKRSQHITNYWKDNIARQKSFLKDFSQQLHQYKRALENSDKAHTKPNLINFNKTFSILANLVNEIVIPLSNGAISFPNISKLEDGEESRHLIEFALNDYSDLVGSIGELKDAIATNGGYTPFAKVTLNHYTAEQKPHVFKNDIDAKIRELKLIELVEKLKNKTSKQIEEYFSKFDKFKIYDDRNQSVIIRTQCFKYKPIPFLVKHELAKYIAEDEDAVLKVLDAIGATRSPAHDYAHNEDVFDLKHYPIKVAFDYAWEQLANGVYTTVSFPEEKCREYLNAIYGCEVTKEPVFKFYADLLYIRKNLAVLEHKNNLPSNPEEFICKIENTFEKIVLPYKIKEFETYKKAILTWINDGRGHEKYTDSKRELGLIRGGLKGRIGAQKMFRKNKKGELIPYYENPYTKLTNEFKNISSSYGKTFAELRDKFKEKSEITKITHFGIIIEDNNKDRYLLANGLQHDNTDQSNTQVEAILGKLNTSLEFTTYQVKSLTSKILIKLIKNHTTSPNAKSPYADFHTSKIHVDWTKIKKEWDTYKSNHSLLQYVKDCLTNSTMAKNQNWAEFGWDLESCNSYEAIEHEIDQKSYILQKHTISKASIKSLVENGCLLLPIVNQDITSQGRKDKNQFSKDWKQIFEDSKEYRLHPEFAVSYRTPIKDYPKDKRYGRLQFICAFNCEIIPQNGEFINLKKQIENFNDEDIQKNNVAEFNNKVNEALLGKEYVVIGIDRGLKQLATLCVLNKRGKILGDFEIYKKEFVRTENRSKNYWKHTLAETRHILDLSNLRVETTVEDNKVLVDQSLTLVKKNRDTPDEKATEENRQKIKLKQLSYIRKLQYAMQTNEQAVLDLLKDNSDDEEFKKRVEGVISPFGEGQEYADLPIDTMRAMIQDLQGVIAKGNKQTEKNKIIELDAADSLKQGVVANMIGVVNFILAKFNYEAYVSLEDLSRAYNVAKSGYDGRYLPSTSQDPDMDFKEQQNQMLAGLGTYQFFEIQLLKKLQKIQSNNTVLRFVPAFRSADNYRNIIKLNPKYDNTEYVHKPFGIVHFIDPKDTSSKCPVCGKTGKKNVDRNEKKNNILLCKACAFRTVWEFKQPENIKNEKHCFSEDGIKKTAEDNNKKIKEKNLSDKNLHYIHNGDDNGAYHIALKSVENLKHKK

SEQ ID NO: 87 - protein, 1171 aa, Unknown
  Metagenome-Derived Sequence
  MISC_FEATURE (1)..(1171): Unk39 Csm1 protein
MNNIKTTKAIRFKLENSASNREIQERIDNLSSNNGFDLVSFVTELNNYIDLLNGYLFCSRGDRFYLNDKFILKKEWMKNYAKQEFAEFKTKIDNTANGVRVQYTVGDYRVESKIQAAFDNIDEIYGELCDDASRELNERSKRTRTALLLKRLYAKNNLPLLIDFVENSTYKKEVGNDSLVLKSMGKRLMEHLELGIQEYLPEQSAGVSIAKASFNYYTINKKPIDYDAKIEEIEKKLVVSNIDRTWNDRDNKIKNNGRLWNIVKADIASRQNNKPLCIGDSPFMDVDEYASLRQIMKNILSEQKAAFNELMQQGGSYKELQNTDLYLFKDITKDEFDKYSELTEDIEELATKRNQTKNEQKKKELKSQIERLSKQRGSFISEADKTTEKMFKTYKAFSVLYKKIAQKHGKELAKLKGIEKEKAESQTLQYWAMILEKDNRHKLVLVPKAKANECRSRLVEADNANGVIKLYWFESFTYRSLQKLCFGNIENGSNTFYPQIRRDRELGRKYSSLDRNGYPKFISGEHEFAGDEQRKIQFYQDVLRTDYARKNLNLPYGKVEERIINSTFESLDDFKIALESICYRRAVCTNIHLIDALESEYGAQIFDITSLDLRREDNIKDKEEKYSYSYKSHTAVWKEFWTAENEKRNFDIRLNPEISIIYRKAKESRIEKYGVDSKKNNRYLHDQLTLVTTLSEHCNSPERNIAFATIDEEERIIAEFNSKLDKGNIRFAFGIDNGEVELSTLGVYLPEFKQKSIESSLTEVNNVDKYGFDTLTIRNLMHSEKDVNGRDRRIIDNPSYFLKEDLYCRTFGKNGEEYKAMFDKVFEQRRLLTLDLSTAKVICGRIVTNGDVISLYNLWMRHAQRNIYDMNEHIEGGGAKVYLKKSEVLNDNEKRKFLDYLNDGNERYERLSDAEKKDYINWIYKIWDGVEVENDRFAEVRRKQKRPGFYFHNVLLAASYIGEEVQDVKDIANIDDVRHVFKFREDFKQFKQEKEILDEINKYNIKVISNEELDLRLNQLKSSLVANVIGVIDYLYKQYKERFGGEGIIAKEGFGIEKVESDRMKFSGNIYRMLERKLYQKFQNYGMVPPIKNLTAFRSKDKSYTQIGYICFIDYDGTSQRCPICNAKLAYNHGLECSEKCGFDSEGIMHSNDGIAGYNIAKKGFESIVNK

SEQ ID NO: 88 - protein, 1165 aa, Unknown
  Metagenome-Derived Sequence
  MISC_FEATURE (1)..(1165): Unk40 Csm1 protein
MNDWQNLYAVRKTINFEFKPSLYTKKRVLDARIKRNSVLIDVKNNTIEIIHLFNTQNQEVANLVQRYLQKLTSDFDILVEKFKNITDGIYINGRYENFRIYVETSKLKLVGKDFRDCYFQMKNERGKSRKGWDYYYQFNAKTNKAEFRHVKFGDFLTVSHLFAFHYDKTTKDGEFQRLLKEKINFFIKKYKCIQIELSDFLDDNNRFEKFISKPEILDRLKRLAYCIGDILSLMNIFCDKGKNGSDGCSVFIKDLGDFRIIALDNDYESVVAEIIRQVNCITNPKAFHFKFTLNFKAKNPNTQLSGNDVFFNEKDLQKKLKEEMDKLENNKKEKSECQSFLSKFDNLAGKDCTDGRWADIKNKQGLPDNYQDAKKEYESCEGKKKELSKEIAYNENEKNNYAVINQLKAAISNSKNTHFGVVIEKEANYYLALENKISNGKLKADNKYVLNNLKNNLFSCKLLKYESLTWKAVEKLCLLPTSSLNGTSKDVVGYWSKFCKGVIILEKKNEKDKRDVFDLGIIKNYLVEIMSKTNISSGFNKEDFDKLVTLDGIKAYFDDYCFENQWIDADWDEFLGLDREGSIDLYQIFNKDFELDEHFAISENDKERIKRIKFAQLILKERFVAKQKNSERIRNLFTIYWQNCFNKFDTEKFRVQPEGRIYIRDMSPVNDAKRYREEKVLGDFGILFNPVAKAIDQSSKDVKDRIGNFNDYLKKQPLKNEIYVVGLDRGENSLVSYTLVKFRKKIVGENDISVRFDSLIGTEAWVLDEMVEVRDLSAVKIFNEKGKWRKSEFVEQKEDYYFVEKNEGNYDEDKNKQDACKKRDELKKMYPDYGDGRERVVVCPIRCKPQTKKEKQQVEMEKTGAYAVKILSWEDEDGAVYNYRVAQEILKEERLSQVEKNRDFELFNTEKFKNGYVSALIGFIGERVETNNAYVSLENLNMGDKTGKGGNYRKTFGASVYQMIENRLMSKLGYSVVKGSSSVHSQKVPKIRKVEELKKDVLSGEKNNKDFQIGVIQITDETNTSQICPNCGYSMNRYGLAKIENGELKLTLNAEELKDKDFGIDISKVTIFRVDDGVFAWRYSGVATEKLDKSHNDFCRVLSKTRQNETKSKDFIRCVHCGFDSRFPTKNHEKLKKVNGGDVLAAYNIAKRGLEFIQCKSEVIN

SEQ ID NO: 89 - protein, 1342 aa, Unknown
  Metagenome-Derived Sequence
  MISC_FEATURE (1)..(1342): Unk41 Csm1 protein
MLTKFANLYELTKTVRFGLTPKNSYKKVSDFFELTEKSLESVQAEIVEREKEKINITSTEESIKKIRAYVDELKKQSAQWKTIYQREDMIAVTKEYYKKLEKEAGFDGFWEDRGKKQPQTSEIMLSALSKEYNNKPRREYIITYWALLLQKTEQLNSYFEPLLEKYEESLSRKEQAHLKPNLVDFRKQFLSLLNVSNKWLMPVINQSIVFPKIHNASKGEQNRKVKDFISEEGRQKRIQLQSIGRSLRDFFEANGSRVPFGKATLNYFTARQKPNRFDSEIDALMLDLEIEEIVRKVKDLNGEELKNYFKYQTYATGDKLDAFLGHSYMTLIEKIQLFKPKPIPASVRFSLAERLSKKMNLPMEKVTAIFDEIGNPIDIAREYEQALDQKNFDLNKYPINIAFDYAWESCASLIKGRISEGDFPKAQCLAILKKFNADGDDFKLYANLRYIRDELAPIEHNNPSADIEKELVYNIQKTIGIIYSSMPSEYQKYLDIILKWVEMPKIERNSSDSNFIFAKQKIGLLRGGLKNKINKHAEITNKFKNLSMAFGRSCSDLRDKLREEHELSKIKYYSVLIEDSKKNRHLLMLPLETGDQKMSAVEIENRLDILENKFVEDAPSANAYIASKVSSFTSKALVKMLKNPKGSEDFHIGSEKYKLHDYNNKIKKEWKIYQDDSKFLSYAKKCLSESKMAMNQHWEKFGWNFEGCKTYADLEKEVDIKGYSLEKKYISFENTEMLVYEQGCLLFPIVNQDYASEVCQNIFTGNKNAFTIEIEKGLQEQDGYLIHPEFTIFYQKPTEDYKKSNRYGRFQLSANFSLEVKKISDNFKTKKEKLKNIRDKDSFQKDVQIFNESINAQLRINEDVYFYGIDRGINELATLCLLNNKNKIQDFIVFKKEKKKRNSENHLREAGDFYTYVDFEKQNILDLTNIKVETWNMRDEIHPNSNFLKQAFKKIEADPEMKMIATQLGYGINEKKQCTILVEYPSDRSNTLKLRMNHFQRALQFATSHSEKRDIVGGIAERNFEGTDLENPSDEVKKQIIQDLFGLGSDFLIDEKKAGVINELQTKKFRFEKIYSRNQQLFLEMFEPLIQQLIEWYQHKNDPDYEKTGKAKYEEMEDLDTLKRGVTANMVGVFSFLMQKFPGVIVLENIAKEKLEKPVQSKLDEHTREVESHQEAEHHRWAGVELYRYMEKKLVQKFSNWRQPTGEIFNLTPPFANLESLNKQTMTINSERIENMFQFGIFCYTPAEYTTKTCPCCNKYHIRNRKKGNTFDSIICKNEHCGFDTRYNEPLHESFNPARNVEIALRLNPEFSEALPKIRSGDQSAAFNIAKKGLIIMENKLC

SEQ ID NO: 90 - protein, 1173 aa, Unknown
  metagenome-derived sequence
  MISC_FEATURE (1)..(1173): Unk42
MASICTSESQVINMEKYKITKAIRFKLEPKQISEIKSNVKAIESENEFNLALFISSLSSFLSKFYEYFFYKNRNDKLLINGRIAIKNSWLKQYAKQEIAGLELKRGQNIGDIGALSDKIRKARDEVNDIYIQLCDETAELNERANRVKKGLLIKRLAARNALPLLISLIENSNDKNETGNLSVELKQLGSKLESQPVSGIKMYLPTQSGGIPITKASFNYYTINKKQIDYGKKKQDQINLLKIDLNDFEDSNLKKASFVKNLKKRIVLDISTRKELLEEKFSKSESAWAAPLVEFDYVSLRQILKNIKSYQIKRFSEFMQREDSTFMNLKENDELYLFNDITEEEFNEYKQKTKDIEKKAEKKNQCNNDELKKKLNSELQNLKKERGSLINAADKKTNSKFKTYKKFVNIYRNVAQKHGRILSKLKGIEKEQVESQLLKYWAVILEESGQHNLVLISKENAGEFKKWLENNKSKEPTSPIKTYWLESLTLRSLRKLCFGYVENKTHSNTFYPEIKKSPQLQKYKNYRGDFIKGEFDFKGDEQKTINFYKDVLRTDYANGVLSFPKQQVKDKILEKKFSTLDEFQIALEKVCYRRFVLCSSDIKLKLIEYGAEIFEITSLDLSNPNKKNIKNHTLIWKTFWNTKNESKNFEIRLNPEITITYRSPKPSREEKYGRNSTLYDERKKNRYLYPQYTLITTISENSNAPTKIMSFMIDDEFKASVDAFNKKLKKEDVKFSLGIDNGEAELSTLGVYLPAFKDKNEFKNINKHGFKVLTMKDLSYSEIDTNEKERKIIQNPSYFLNKELYIRTFGKTENDYNKMFEEQFEEKTLLSIDLTTAKVINGHIVTNGDVPTFFNLWMRHAQRNVWDMNDHSKNKTAKKITIKNNDELTETEKTKFAEYISDEKKYKKLKDEEKSKYLKWIFEDRKTLKFTEEEKDKFEKCKKRKDNFTENILFAVCQIGKDIQSVTDVFDVRHIFKKRENFDALKPEEEIKKEIESYNSSESIQKISNEELDLKINHLKQSVVANAVGVINFLYNYYKETTGGEGLIVKEGFDTKKVADGLEKFSGNIYRILERKLYQKFQNYGLVPPIKSLMAVREEGIKDNDIDKTIRLGNVCFVSQSKTSNICPKCNSNKLKHGDICSNCSFNLIKIFHSNDGVAGYNIAKRGFENFNN

SEQ ID NO: 91 - protein, 1217 aa, Unknown
  metagenome-derived sequence
  MISC_FEATURE (1)..(1217): Unk43; Xaa=Gly
MSRLRFPQQSMIPMTSIQWRCKWCIQYSPQRSHYPQKNLRXREINHSQTIRVXQRTKQIKLLLSFLNQSIMSTIFSDFQNLYEVRKTVRFELKPTIIKRVFHKSNDVNLEIILKDIIEKHKNFIDMLXTTFFFEEEVRINSKGEEDKQPGLSNKPFLNIMEEDKEEDKALSHESEDIKSPLSQTRXKXIRDFSGYSPQNIIRFKYQXIEKAFRNEWIKYREDIVKYRTNQQRQKIKIKNYITFSDLXDDGFLKPFFEELLQSHRELYDEMSALICTYENNHSRLSDVCFALXQLNSRKYLGALYMLFEXGYVVHKNDTEIIXKLTEQLKTLKLIIKDAISLLRPLQSFGLPIEHVSLNYYTRNKTPKEYDDEIKIKERDLQLSYRGVLXALYXIDSNQSIENLYKEMKNFKAQQKMAFMQQLQSQVSLGNFRKPFTFIDHEKESHEKFELHLFSNLSEDIYNKMKGLTKDIEXISDKEKRKELKQKRGKLLKNQLGCKQYVDFCNNYKKVAMEYGKKKAEVLSLLREKIEAEKERXRXCLSKNNEESFFINTFEPKLAKDMYNDISTMPHQTDXEITIYLLSSITLRAFNKLCFKKXSKFVKXLLXKLDVKYTKQAPYKENNTFPITLKGKKEMEEEGILIHFYNEVLRKQDSLSIKYRSDDSKDLLKNCKDSNEFEIVLKQETYMLEEKKISNDRFHELIEKYQXNSYQITSWDLRKERENPEEQTLWWRQFWSQKNIDNKYNLRINPEITISFVGKDEEFAKTHPNQSNNRKSKERYLLTTSMTHKSDKAYIDSXFIEDTARKENIINFNTVYNQDKQFDYLYGLDKXTKELVTLXVFKKXNGNIETVNLXEEVSIYKITEKGFQKNKTVTNKNGETKIRYLRDNPSLFMEYIDDNLIFEKQNIISCLXDFSSAKVIKXHIILNGDQATLKNLYLTDVKRKLYEKKSTGEMTSETIXYDQIENVFYYEYINRENVERFPFESLKTIDYLITKEEIEKELKDFLEDVAKDNISIQRINNLRNAICANIVXVIMKIQESYPGYIVREXLGDDTQHKQKKTNTYLXNLINEKIYNKLFLSIDVPPILKKFRSETNITTLEQVIQHGKVMYVNKDNTSSKCPLCNKKLFGHMTDYEYEMHHYQEXNDVDYTQXNDNKXKNGKERMDNNLKQSKKTENNNCNYHMKNNPCXFDFIKSXDDLAAYNIAKKXLEYLKSREIS

SEQ ID NO: 92 - protein, 1337 aa, Unknown
  metagenome-derived sequence
  MISC_FEATURE (1)..(1337): Unk44
MSDTKYQITKTVRFKLEPYVVTDESQTEEEKELVLQKETARIKEEMLQIRTNSSNKNVSLEDVLNSKNDIDYNELNTLRTDLINIISQVKYLIYKTDTNGNIIYTDKGPLWSDLEIKFSFLRDYIKSEFYNFKNNKYPDTIKDKPPKKYKLYCVDIQFFRDAISGEQGLFERLNEIEKKIEDFTERELHNKSRFADIALVLGDLTKRTNLEFLKAMVNALVVPNNDEKERDLQKNKLFYAIQDLESLVNRQLAYYTPFKSSMGLQTHGGSFNYYTINKDEKELQEEEKNLTNQFNRIIGSAQEIANTKEVEKKLNIELKEVQARLKECGVDAKEEKCQLKDREIQIKNELSDKKNEKILISQIRKFNLTFDVLVSLYVEKRRKKNDDDARIKIIREQVMSEFHLTNKDLEKTVELNIEEMYKFIKLWKGNEKTKYTTNLKIYDDNQSAQDFVNNCKLFSFNDDYDKGGNLCKTDDLFNSLKALECELKTYSDELGEKYNLKAKIEESKESSFDNEEQQLCDAIKILKEKIKKLKKEIGDIFFYKIGLQNYTDFCNSFKYLAVKFGQMKARRAGIEKDKVEAKLLHYWCVIMEHDDKNSKGETITNKYLYLIPKDNVKNAYNDVKSKANSGNQTGNCNLYYFESLTLRALRKLCFKEKNNTFRKELPNWFPKCEQRARKKGETKETPTSEKDRIFYFKTALTSLNNSGVLDIDNNSNILTMPFFKFKTLDNFETELNRCCYKRIAYVNDNYGDELMSKFNAIRFKITSCDIDNSKERCFTTEIWNQFWNDTLNKDKQYPIRLNPEVKIFWRTAKPSRIEKYTNNLNRNQNFKNRYKKDQFTVAFTVTENALTPKPDYGFIVDEKKPILRGFNKQCDLQTNIDNFNVQLNKNHSVHFSIGIDTGTNGLAYATVINVNNQPELFKVLRIKNNKGVESKDDQHNVRTKQYFYVDELNLKYFTNEEMYNRVFDDGKFYETLQKFDNGKVKTEFEKDFQIGKQIRWVSENPSYFLNESLYNMSFNDGRFIETKVEVFEELEVASLDLTTAKVINGDILLDADFNTYQKLKILNAKRWISREARVSTSLSLVKRNNEICMITTNYPNNGKTIYYQDAIHESNEDFSNVFNQLEKHKVDMSIDLVKIEDNINNYRKAIVANMVGVLTEIYSRMQKKYGNRTLGFIAFEGFDAKTIQSHLDKFDGEITVPLRVALMKKLQLKTNENKKKNTIWFENLVPPYAEVNKFSDEMKYVIKDTEDKDDMEKGEVKQFGVIKFVSKANTSECCPICGKKSNTKHTDYFECCEITLRDWASTPNMSDDDKKLFASIDCNDKVAAYNIAKRAIW

SEQ ID NO: 93 - protein, 1117 aa, Unknown
  metagenome-derived sequence
  MISC_FEATURE (1)..(1117): Unk45
MKSMKKYQYTRSIGFQLKGDAVQHLKPKVVNEEEFDFQELVNQYDVILADFKRAVFFVDEKNKKYIKKSLEIKSPWLKKHAKVQFYYKKLYEKKEKKFTIETAPFLNDIFFDWAERNEMLLEEMKKIAQKPLCKQKRKSDFAFLARKIFGSDYLFFVRDFSEYAKDTQLNEALQRLKKSVKKFTEYLEHSLYILSPQQSIGMEVARGSFNFYTINKISKLFGEKTVEDIITEKEEEGNMPYHKAVNSDFLEKMGLCEYLKNWEGEDGEKYSTTVIKDLSFWELYLVLKDFKARQKKEFNEVIYQEKWRDESITQSSQKRVTGKFCFSKIKGKKFNSLEDLAQAGGLSVSKEQKTKIHFEVQQKKKLKEYIKNTFPLFDCNEDTLWEFVKLTEKIKKKAQEKNNNNVDKDVISEDLKTLRNKRGKYFQHKFKNYSKYCKDFKFVAMDFGKLTAEIRSLEQEKIEARLLRYWAHIIDDGHQKSLLLIPREKISEAKRFIENSGEQGNYRLFSFNSLTLRALDKLIRKNYAKEISEESGHIPFQQDQEKISCYKRALKGELKELQLDSFGFEESLEEIILREYNSLEDFRIALERVSYCVHEKTVSKNFLEELQSKYQAIITELSCFDLERDISGRKRAHTICWENFWYESNMKNNFPVRLNPELRIFYRDKIEQEDVKKQKNRFSKQHFRARFTVTQDAAGKELKTTFSNEKDLCKKIEKFNAEVASNFIKYQEAEDNFWYFGIDRGNQELATLGIVKWTKEDYKAIMEEGSIQKFSKPYFPEIEVLEISDMEASKEIIINRDGTKKEVKIKDNPSYFLQNEAEIKTYFDEKKVSFIDLTTAKLIKGRIALNGDTKTYLNLKRANAKRRLFTEFTKIDKNSDVYFFEDDSSFRINFKPGERRAYQILCYYLPQQEKVLSRDVMKKELQGYLEQLRQDPTFQENTIEEINHLRDAITANMVGIIAFLHEKYPAIINLENLHSKANIQRHFNSNNENIARRLEWALYRKFQKKGLVPPNLKQTIFLRESIAANSKIHNFGIIQFVETGGTSGNCPYCGVNVSGKQRKKDKFVEHAYICRNNKMCKFTTKNPKYPLEVIDNSDSVAAYNIAKLGFEIVSAKL

SEQ ID NO: 94 - protein, 1031 aa, Unknown
  metagenome-derived sequence
  MISC_FEATURE (1)..(1031): Unk46 Cms1
  MISC_FEATURE (38)..(38): Xaa=Ile, Leu, or Val
  MISC_FEATURE (387)..(387): Xaa=Ala, Val, Glu, or Gly
  MISC_FEATURE (410)..(410): Xaa=Phe, Ser, Tyr, or Cys
  MISC_FEATURE (798)..(798): Xaa=Tyr or His
  MISC_FEATURE (876)..(876): Xaa=Asp or Glu
  MISC_FEATURE (899)..(899): Xaa=Gln, Lys, or Glu
  MISC_FEATURE (924)..(924): Xaa=Asp or Glu
MNHPIQKNFNLFEVKKNISFVLEPLFEPSTSFEEISNXKTDIKSFLHKYDLVTKIMYWILLNQSSMKLNDKLKIKFCFLKTHTKDAYFKYGIEKLKNKHKNQIEMSSSELDYLIEVFQNFFQDNFTYSENLKQLLSQTSLQNPDIKYYFHKIASKANFDFFCDVSHSINTEIPSTYGKITAIKEIIKDLEMLKYKIQNNLHQEQSLWKTIEISNLNYFLANKKSKNYNELILNKENSLYHHIFAFPKFHAAKEENGLKDFENTYSLSYSHSSLTETYELLKEYKSSQKEWFLQFIQQWHWFEDLQNHVSFTFKSDHFEPNEFSLTLYLFDDISSENFEMIKTLSDKINFLIDIKNNSEKLLSCQQEYKDMFQEECFIWENPYETSKXLTKKIIQLKKESGTFFNTENQSXMFKKYAYFCAEYKKITLEIGKIKAQIKNLKDEQTQVESTNSWALILEKDTQKFLLTIPSEKANNSYFEKESNILQASNFIQWLSHQNNDYKLSHFESLSLKTLDKLCFAKESSYFSNKIAKELYQVNSDFVEKKEFIKFGKTVETYNIKMKYELPKTISWETCKKTLLNFYQSVIKLNSLKEQIMIENTQHFEQFINKSFENLIDFEKELKQICYIKQSIFISEASKESLIQNYYGNLYKITSYDLEKSLKSKNLKTHTKIWLEFWSEKNTWEKFPISINPEIKINFIKKDDSLWENSLNKKTNSKLNDSYLLTTNITQHACKNSWFINEKTKKEIIHFYENFNSDFESKNPENHLNHSYFIDIWENNSIKLSLYDNKNNSPIEIKIXNLKEEYFLQTNEKSTPAYKNISYFQYDSFQKLYDVESVQYVDLSTAKLVNEKIYLWGDISTYLNLKINCAKKKISQLXHWKISVSETNPNHIILTGWALPXTTIYNFDESYKTIQSKESIIKELEXFLEAKNIDSYFPENISIENINNLKNALSGNIIWIIFFLQSTYPGKIIISNFITKESMSCPDGLDKQIEEKILQKLSSLSLIPSNYKHILDLKNKNVLNKLGMVEFVN

SEQ ID NO: 95 - protein, 1160 aa, Unknown
  metagenome-derived sequence
  MISC_FEATURE (1)..(1160): Unk47 Cms1
METYKVTKTIRFKLEAQNVPEIQKDIEGLQSEFNLANFVSDLKNYLDQVRNYLFSEGKEHVFVNNKITIKREWLQNHAKQEWVDFLEKNKRNNSLNNHTRRIQMSIGDFTGLASKIEGTFDEINSICKGLADAAGAQANKRTKRERTGLLLKRLQARKALPSLFSLIENSADKNETGNLSLQLKNKSILIEQQLAAGVQTFLPAQSGGLPVAKASFNYYTINKKPVDFGNEKSELESRLKISIDTIFKLTRENFSKKIEEAITADIQKELNNGKTLLLGDVPMLGIENYVSLRQILKNIKSNQKKAFSDLMQSGKNYNELKATNLYLLNTIEQRQFDNYKVKTNELEKLAVKINQATNDNQKKELISNKQRVAKQRGIIMRDNFATWKSFSNFYRTISQEHGKILALLKGIEKERTESQLLKYWALILENNGQHKLILIPREKAASCKQWIASLNPSGDKLTKLFWFESLTYRSLQKLCFGFTENGNNKFNKNIQNLLPKDNSRKIINGEFAFQGDEQKKIKFYQSVLESKYAQSVLNIPIQQVQADIINQSFASLDDFQIALEKICYRLFAVVEANIEAELLKNDKAQIFNITSSDLRKEAKDKIKSHTQIWKAFWTSENKQNNFETRLNPEITITYRQPKQSKIDKYGERSQKNNRYLHAQYTLITTISEHSNSPTKILSFMSDDEFKSSVDTFNKKFKKDEIKFAFGIDNGEVELSTLGVYFPAFDKTTYKEKVAELEKVNDYGFEVLTIRNLNYKETDYNGKERKIIQNPSYFLKKENYLRTFNKSETAYQKMFTEQFEKKKLLTLDLTTAKVICGHIVTNGDVPALFNLWLKHAQRNIFEMNDHIQKETAKKIVLKNQLDTDNEKLKFAEYISKEKEFGKLNDDEKMKYTKWIFEDRDQNNFTEVENKKFKRCQKIYGNYSTKAKAPVLFASCFIDEELQSVTDIFDVRHIFKKREDFYALKTEEEIKQLIDSYNTNRASHDISNEELDLKILNTKKALVANAVGVIDFLYKHYERRLGGEGLIIKEGFGTGKVEDGIEKFSGNIYRILERKLYQKFQNYGLVPPIKSLMAVRANGIENNKNAILQLGNVGFIDPAGTSQECPVCIEGRLEHTTTCPNKCGFNSERIMHSNDGIASFNIAKRGFNNFVKSKTDKQ

SEQ ID NO: 96 - protein, 1161 aa, Unknown
  metagenome-derived sequence
  MISC_FEATURE (1)..(1161): Unk48 Cms1
MTQQIEEKQSSQNSVWDNFVNLYAVRKTINFEFKPSISTKNRIEKIIQEESKLINAERNTIEIRNFFNNQIQENVKLTKRYFNENLENFDEILNKFKEITGKIKTKNNYENFRIYVNTDKIKLLGKDFRDCYLAMKKKKSWKYKGVNNTLKLIKFNDFLTICHLFDYNKDTKTNENEFEKLFSEKTELLIKKYEFIKKQLKDFLDVNNDVNNQAEKFITKPEILDRLKSMAFCLQEMIAVMNIFCDEGKNGSDGFLAFVEDLKGFRKLVLDKNCEEIIDEIIRQANHITNPKAFHYKFTLNFKAKNPNTQLSGNDTFLSEKKLQEKLKQEMDKLEANKKKKSDCQSYISKFDNFGEKKCTKDQWDLVLNKQGLPDDFAEAKKQYDEAKKIKKKSEKEISDNQNEKNNYAVINQLKAALRNSRNTHFGVLLKKDGNYYLALENKILDGKLKADNEYVLKKLENKKASCQLLSYESLTWKAVEKLCLLPTSSLNGKDEDMVEYWGKFCKSEIILEKKNDNDKRLLLDTEKIKTYLKKIVSDNSLSKFFDEKTFDECKSLDEIKKYFNDACFTNKWVNADWEEFLKLDNEGKVDLYQIFNKDFELDEKFATSENDQQIIERIKKAKENLEKKFVPKHNNTERGKSLFTIYWQNCVNDLNVDKYRLQPEGKIYIRDKSPIQKSKRYQEKKVLGDFGVLFNPITKEIDQSSRDGKTRIGNFNNYLNKYSRDEICVIGLDRGENNLVSYGLVKFKKKIMEDSDIKVRFDNEIANECWALDEIVEVRDLSAVKVFNKNGNWEKSEFVKQKEDFYFTEKNGTNYDEEKNKQSAENKKTELKNQYPNYKDGKERIVIIPIRYKPKKDEEFQKTGAYAVKILSWEEQDGSVYNYRVAQEVLKENRLEQIEKNKDTELFETEKFKNGYVSALVGFIAEKVKKYNAFVSLENLNINKAKQGNYEKTFGASVYQVIENGLIIKLGYLILKNNPQNYTQLVPEIRRIEELKKGNDEKDRNYQLGFVQITDETNTSKICPNCGYSKNRLESANTANGMLKLSLKTISLKNDDFGIDDSKKKNFLVDNKTTAYKYAQDGIICEEIKSGNSDFAKTFCDPRQNMTKSKDFIRCAHCGFDSRFPHNNCKKLEKITGGDTLATYNIAKRGLEFSQEIKKT

SEQ ID NO: 97 - protein, 1000 aa, Unknown
  metagenome-derived sequence
  MISC_FEATURE (1)..(1000): Unk49 Cms1
MHNMQYEYTRTIRFNLSGEKVSYMIDVDAARSLEETLANLLIAYRDLLGVFKKAIFYEDKEGVLRVKSRLEIKKSWLRQYARKAFYSLPEVIRGRGSKFPAKDFEGNFLDWLQRSRDIYMDLTDVVSRPENDKIKRSDISTYIRLLKTSEYFPFVEKLLRPWIANDKDTNEYLDALRSIVERFGQLLDQALLVVSPDLTQGVEIGRASFNYYTVNKISRNFDKDIDDIRNKLESPFSGSLDKQFLEKVGFRKDSSRIPIQELYEDLKRFKAEQKKSFLEATQADVLFEDLQVKYPLFKLKDDQTLQKFKGSNPQKRGDYYRNNWGFSDYKKYCDNIFKPIAIKVGKLKAEIRSLEQEQVDARLLKYWAHIVQKDGRHLLLLIPKDAMQRAKQFLEQLPSKHEGESMLIGFNSLTLRALNKLIRRNLEREQTRLQDDAVSLYQEVLKGQHQRIQLDFNGFEQEIREVASGDYANEESFRIALDRVAYVQSKAHINEEQMAKLQNDFGALVLDISSYDFERTITSDKKEHSQLWEAFWDLKNQNNQFPVRLNPELRIFYRPQRDQEDIRKQKNRFSKNHFGVAFTITQNATQNRMETAFQEEKALLKMVQTFNHEVIGTFVEEKGENLYYYGIDRGDMELATLGVVQFSQERYEAMLAEGTVQIFDTPVFPLVETYRIKEEHLHDTKEIAINSTGKTQTITLFKNPSYFIEEEDKFEKGISPFMDLTTAKLIRGKIILNGDVMTYIALKKANAKRQLFEKLSKIDTNAQIEFDEIKKQFKIKSKDSEREDCQWLPFYSEEQEKVFPREAMRKELQEYLDKLRADITPEEGVSVEKINHLRDAITANMIGIIAFLFEKYPGIINLENLHSKDQIERHFSNNNENIARRLEWSLYKKFQKSGLVPPKLRQTVFLRENETEEGKKLNQFGIIHFVPTKNTSANCPYCGVSVPMKQREKDKFEHHAYICRNNSQNCGFDTRNPKQPFEYIKNSDDVAAYNIAKSKI

SEQ ID NO: 98 - protein, 1143 aa, Unknown
  metagenome-derived sequence
  MISC_FEATURE (1)..(1143): Unk50 Cms1; Xaa=Gly
MTLQNLTNLYEVIKTLKFELKPSINTKERIKFDNIKDLKLLENPSELLQTTKELASLQRSIFXIIFNLGSENIIIHKNLIKIIDSDVFYYFKNKQLSSIVSLSEVIKSIPEFSNTFDXFIKNIEDNLSKNIHKFESYILNIEKVYTKTEIXFAMKQYSLQIQKSHEVISLFVYKTXKIDGELKENLKKYFSFEDLENTIKICSQTMKSYNPTIGFEIHKFGFNSKSINKKADVDSLQKQCEKLEEEMEKLEEHKIQATQIFDAYTKQFNDYVIHXKERDEKTWXKVSEKLIPXDPKLEALKNNQTSSIQEIKEAKEYLKSIRDXNFDYQKINIAKNKFKKSLVFVDKIPNKKKENEYYCFXDNIYWDLKIKKTKKSIFYXKNKXDLFAKQTELFNQQKLTHYARLLRDKNNFFVAMVDRDCILELENIKEDKDIKEDFLKIMEYSSLTSKAVEKLIFERNVLNFDFKDEQFIICKKIRETRSYKEKXSTETQAQTLEEKQKLIQLVKFMNDAIXQINEKIENSVFDWKPFVIKDSFDDFEEFRKYITKSCYQTKRTKVSKDKIYELDKKXKINLYQIYNKDFXVDPYFAITERDKNSNFIEKKQKPNLFTIYWKDLFEQNXENIRLNPESKLYLRPSKKIEDIDXNNCDYXASKLRFKHNKIIADFQLVFYPTKKEKLEEIQKKIYNEIKEKTFSVXIDLXENSLATICLIDDEKRVVLDQNXNPIIKDLTLVNNKXGFVDIDNCFIENENYKRKDKLFIENDXSYFLTDWYFSSFLCQKPIKELSKEELKNVLIELEKMSPKELKITDTNXNKVFDYRYAFVYKQTENKIRYHLQSIGLNEEEKKFKELELMDTTRIKSGYVSKLVSYITDLAKEYNAVIVFENLDQKASYIKXITLLSEELFENVSSKEKSQLTXISVYQNIQNKIIRKCNLFMQKTGINTKLQITPKFKNIEEFKNFNMTNKDKNVXRXNVIFINEENSSKECPNCXFIPDTNPKIKDCKIVYKYNXEEKELNLDDEKIKDRKEYKKIXDLMQTRIKYTDLSKSXKWYIDXDPMVCVNCGYDTRKEARVKKHNLKSCDEIAAYIVAKRXLEFIKSQKVVESISQKQINNEKIEIHKNQKNNGFINEESTISGNIVFSXNI

SEQ ID NO: 99 - protein, 874 aa, Unknown
  metagenome-derived sequence
  MISC_FEATURE (1)..(874): Unk51 Cms1
MKECKSFLKESFQVDTDKNPHFKLYAQLIHLKEFLSTLESARPKDTQSIVKETQNLLSQINWDALGKDKNDKRTGNDYKISISSWLELRPKNDEKFQKAKQQIGLFRGGLKNKIKNFNDLTQAYKAVAMKLGKAFGDMRDKITGAAELNKISHYAAIIEDKNADRYILLKKSQLSGGSQKPFQSNDSGDLLIYTVNSVTSAAIGKMLRKMRAEELKKNEKNRQPLPELTDEKKEKESIERWKSFIKEKGWVSEFELNLDNKTFEQIKKEVDSKSYSLDVGRLSKNALEKLIHNEECLLLPIINQDLASEGKIAKNQFTKDWQRLFADEPQNLRLTPEFRISYRQPTPNYPDPGEKRYSRFQMMAHFLVDYIPKIDSYISIREQTETFKNPEKQKKAVAQFHQRLNPKSKSESDPIALLSAKFGSQINKNQGRKASTEEAKQKEDFFVFGIDRGQKELATLCVIDQDKKIIGDFEIYTRQFNAEKKRWEHSLLPERRHILDLSNLRVETTLSIDGIDQKKRVLVDLSEVKVKDKEGNYSLPNKMQTKMRHLAYIRKLQFQLQSNPDGVLDFLSKHPEKENALDNLLDKEEDEKGLISYYGAGNASEDLPKEELWNILVNFRELKNQLQEDPENQALDQELRALIELEPVDNLKYSVVANMVGVIAYLMEKFNYQVYIALEDLTNPFAPTTVSGITGVSNKNRQGEGKKSDVEKYAGLGLYNFFEMQLLKKLKRIQQENGNVLHLVPAFRAVKNYENVIAGKDKIKNQFGIVFFVDADSTSKMCPVCESTNDKQPNKSKYPEAKKEKSREGKEVWVERDKFNGKDRIRCYVCGFDTDKDYDENPLKYIKNGDDNAAYIIATLGIKGYELSLADLNP

SEQ ID NO: 100 - protein, 1145 aa, Unknown
  metagenome-derived sequence
MSELKFLGDYSYNKAIRFKLEHKCGELPKFESNNSNPLDLIDLGLKIVDDFKDLIYLKTEKNELKLDKNKSPILTKFVSIKKQWLRYYTKLEFYDGSKNKSVDFSITNFPYLSDSFKKWIVDWTDAINHLNNLLQDKENLMIRRSEIAYYLLLISSKNYFNYIKDFSFYSNDKNTTKVAEFQKLILIFEEKLNSCVIKYAPAQNAGLLIASGSMNYYAINKKPKDYDFELSQLKKEYEIKQEEYNLFKVYKSTQKSLLFQYINSGLDKDEILKKLADNYNFYKENNKKIKTFYSGDSGNDLAYKYSRLFADDRALTSIINLTDKINELNLKLQTTNNNKDQIKLEISALKQKRGFYFIKRHPRKSGDPDFYISNEKNWHDRYTFCFSNYTNFCKIFKVIAQKTGKLKAKIRAIEKEKIESQTLKYWSFVVDRSDEKELWMVPKENRTKFKDLLKSDNSTDVNIYQLTSLTMRALNKLCFAEESSFVKDMPDYLKDLQKKVKEATDDEQKIKNQRKKINFSTDIKTKSELKLSFFKELIKSEYAKSLLDLSKFNLEDLQKVKDLKEFEMLLEKNCYVLEKIGLSKESCEKLIKECNILIFKITSYDLEDRPKNTYQTKESDYKRITSEIWNTFWENPGINLRINPEVKIRYREKNEEHIKYLEEKGFDLTKIKNRFIVDQYTCYFTFTLNPGKLYPELVFAKTEELIKKIQEFNDQFNKINLEGTYKYGIDRGSIELSTLCLAKFDKNDVYTYTVDDKTKTILKPKFPNGEEDIKVYELKKELYNKKAISDLENLPMEKRKPKRIIANISYFIDKINDPNWFNKKTVTCIDLTTAKVIKDKIIVNGDLLTFLKMKKEAAKRVLFELVSEGKITPDHKELKWGSENLEDPSSRELRYYPYTSDKIVYHFENNFGRDLEGLLIKDDLIYSKENVLSNFQVYLTELLDNKLADKNEPNTHTPTIPKINNLRRALVSNMVGVITYLQKYYPGYVVLENLKSSEELNKFERNYINTSIPFEKALIQKFQTMGLVPPHIKNLWEIREEKTKKNLLVNKQNFQLGAILFVNKDRTSKDCPYCEKPYTWDKEKADELKFKLHQYKCGPDPSCGFDTKELLPKFDFLKEISDPDKIAAFNVAKRWKDIVENDAKK

SEQ ID NO: 101 - protein, 1174 aa, unknown
  metagenome-derived sequence
  MISC_FEATURE (1)..(1174): Unk54 Cms1
METYKTTKTIRFKLEADDKNIPYIKEDVINIQTNNNDFNLTDFISDLNIYLENINNYLFVQKKDGIFSINEKMTIKNAWLKQYAKQEFVAIKERTNLESKRREQVKIGDIRELISKIEKVFDFVDQTYVSLIDNIYSELNERAKKAQIGLLLKRLASKNALPLLMDLMENTSDKEETTDLSIRIKSKSSTIRSQLQAAIQMFLPEQSSGLQIAKASFNYYTINKKPIDFKEKINKLEDSLHIKSMESINTFFNRKKGKQDFYLKKEIFDLLNTDIQNAFLEKQTSCLFLGEVPMIDKEYVSLRDILKNIKAKQKKLFNELMQNNSSHNDLKNSELYLFNKISKELFMDYLNKTEEMEEVGTELSNHHLREEDKKRLRSKKARVTKERGSIMKDNFKEWKSFADFYRIISQKHGKILAQLKGIEKEEVESQLLKYWALILEKENHHKLVLIPKEKAGECKQWIEKVNEITKLNNEHAKIFWFESLTYSSLQKLCFGFAENGNNEFNRNIRHLLPKDERGNPINGEFAFGGEEHKKIEFYKNVLQSEYAQQVLHIPIEQIKNEIILHTFNSLDDFQIALEKICYRRYVVCPPNLEDSLEHFKAQVFDITSLELRNSKKNNLKSHTQIWKDFWNSENEINSFNIRLNPEIAISYRVPKASRIEKYGAKSQNYDPEKKNRFLHPQFTLVTTISEHCNYPTKVLSFVNDDEYTKMVDSFNRKLQKENVKFAFGLDNGEDELSTLGVYLPEFEKATIEEKIAELKQSQKYGFEVITINDLNYKEADYNGKERKIIQNPSYFLKKENYMRTFNKSEQEYEDMFIKLFSKKHTLSLDLTTAKVICGHIVTNGDVPALFNLWLKHAQRNVFEMNDHTADETAKSIRLRNNEELTNNEKLKFAEYVSDIKKYEKLSVDEKTKYLKWIFEDRNNNQFTDEEQKTFNDKYLKKKGNYNSPIIFASRFEGDDLQDVTPIFDCRHVFKKKEEFDAIMPINDIVTLIDSFNTNRSNHNISNEELDLKITESKKALAANAVGVLDFLYKQYKHRFNGEGLIVKEGFDTQKVGEDIEKFSGNIYRILERKLYQKFQNYGLVPPIKSLMTVRSEGIKDNKNAILQLGNIAFIDPAGTSQECPVCKEKSKKKHTDNFDCQCGFYSKGIMHSNDGIAGYNIAKRGFENFKKEKQ

SEQ ID NO: 102 - protein, 1228 aa, Unknown
  metagenome-derived sequence
  MISC_FEATURE (1)..(1228): Unk55 Cms1
MEPIKNEFQLLKALGFGLTAKHSEKKNKTHEELMDLIQLSEERIKGKTKPTNEITEKKMLEIISECVFLMKHHINTWEKVYNRADQITLTKEYYKELAKKACFDAFWTDNKDNKQPKSQLIKLSSLKKPRYENYERMGYILRYWRTNIQNLKRKIHDFELLLSQYKLALSKQDKAHTKPQLVDFRKMFLSIVALIHETLIPLNNNSIQFLQLDKLPDGEDSETVKTFAIEEREERKYLAAKIKETKEYFEENGGYVPYGRVTLNPYTAKQRPHIFNEEIADIIKDLGVEKLIKKLQSINDISKYFEFAESDNDKRKLMKDSSYSIIERVQFFKYKPIPASVCFMLADFLQRTKKLEKENVLDLLNKIGMQRSISKEYKDKKSINLEQYPLKIAFDYAWENLAGRIHNSTIPFSDQQCVDFLQQFGVDINNDNFRLYADLLFVKNNLATLENPKNQPNDGSEFIDNIKRTFENIKLSKENNKHKDVILNWLNKNTEEQKELKKGNAQLFKDYEKAKEKLGQLRGMQKNSCPKYKSLTEEFKNLAIDFGKKFADLRDKLREESELNKITHFGVIVEDSQKDRYILLGKPEDKLIHKFLNNDPNGNLKTYNVKSLTSKALSKIIKNKGAYKAFHSSQVKIDRKEIKQKWQEYQDHGDFINYVKDCFANSPMSKEQKWSEFQCKFDHCQKYEEIEKELDAKAYLLKEQNISLQTIKKLVEQEDCLLLPFVNQDITSKTRERKNQFSKDWDMMFKKDNGYRLHPEFRIFYRQPTPDYPKSGEKRYSRFQMTARLLCEFIPQSDNYISHKQQIKTFNNKDKQEEAVKEFNDKLHHPDNFYVFGIDRGINQLAVLCVLNKEGQIQEGFKIYTRSFDIEKKQWIHELSEKRNILDLSNLRVETTINNEKVLVDLSGIKIKNKEGYQDNRQKIKLKQLAYIRKLQYQMHAAPQRTLAFINKYHTPEDMKKHIQEDIKELITPYKEGVNYSDLPIEKICDMLQQFKQYYDKEDKKSTRELTELDSADELKTGIVANMVGVIAYLLKEYDYKVYISFEDLTRAFGRQKDGLDGRELPHSNEDKTVDFKGQENAALAGLGTYHYFEMQLLRKLFRIQQENKDILHLVPAFRSVDNYEKIVRRDKKSDNDEYVNYPFGIVRFVDPRNTSRKCPNCGEIKKQIITRSKNKITCRKCGFITGNNNHDKIKDNKKDKNLHYITNGDDNGAYHIALKTLKNLKGQ

SEQ ID NO: 103 - protein, 1210 aa, unknown
  metagenome-derived sequence
  MISC_FEATURE (1)..(1210): Unk56 Cms1
MEKDKITAISEYQTQKTIRFGLTATNQNLYSEEIMELLNVSEKTIKEQVEKVNNDIDKNNQLRYCLEQIKKYIETWDNVYYQIDFWAITKDYYKVIAKKAKFDFDKGNGSEIKLSSLQSAHNNRKRYLYIMDFWKENLYKTENLYRKSDNLLKVFEEAEKQNRNDKKLNEVELRRTFLSLFNLVNESLKPLIEGNLFIVNDDKIDEQNSNHKFVEDFISKTDERKQLYDCITELQKFFNGNGGYVPFGRITLNKWTAQQKPHIPKDKNGNNEIDKIISFLKPESVSMQNIDYEYDAFEDNFEQIDNKWKLKQNAKSVIEICQFFKYKKIPVNARLNLAKRLNKDIHFLSDFGVSKSPALDYKNDKDNFNLANYPLKVAFDYAWENCAKAKYETITFPEQKCKDYLKDVFDLNVDSNTDFTKYALLLRFKILVGRIKAEENTRKENIETVRSLLKDVKDNLSKEKDKTITSVENWLTFKEKQTDKKEKYENQDEFSKVMQTIGQERGGLKSRISKYKTLTEMFKVCASKFGKQFADLRDYFNEAYEVDKIKYRAWIIEDGKLNRFVLLADKTKDLNLENDKNGNLKLYEVKSLTSKSLVKFIKNKGAYPDFHIVNNRQIYLNSGGKDNRGNFIDDVKIHWSIYQNNQKFLNKLKDCFQNSKMAIDQNWNEFNFDFSNCDTYEKIEKEIDRKGYILQQNSISLDKVKDLIKNQECFLLPIINQDINREDKQAKNQFSKDWNDIFVNTKRLHPEFNLFYRFPTKDYPNTKFKNGTEKTKRYSRFQILAHLGCEVIPQGNYLSKKEQIAIFNDDEKQKGEVKKYINICSDFDCVIGIDRGIKQLATLCVLDKNGSIQGDFKIFTRTFNHDTKQWEHHFLEKRNILDLSNLRVDSPITICCNIPDDNHKKVLVDLASIQTKNGENQQKIKLKKLAYIRELQYAMQTQDLSEFVNSLKSADDITQDKIKNFISPYKEGPPYADLPKQEMFDLLKEWENADDEEKQVIAELDSADNLKSGIVANMVGIVAFLCEKYNYKVRIALEDLTRSYGIQKDALSGTTIFQNDEDFKEQENRRLAGVGTMQFFEMQLLRKLFKIQVDKNLHLIPAFRSVANYEKIVRRDKQNSGDEFVNHPFGIVCFVDPKYTSKRCPKCGKTNVDRKENIVICKEKSCGFQTKEGNPFEKNNIHFITDGDQNGAYHIAKKVLKKDSNNETKK

SEQ ID NO: 104 - protein, 1219 aa, Unknown
  metagenome-derived sequence
  MISC_FEATURE (1)..(1219): Unk57 Cms1; Xaa=Gly
MKNFTNLYEVRKTINFEFKPSFSTQKRVLKDRIKEISTFKDEDKHIIDIIDFFNNKNQEAVIQTREYFKNELDFFDTVFESFVQIMNKIESKKNYENFRIYVNTAKIKLFGKDFRDCYQEMSRARTRKGRGWDYYYSFNQGTQKPEFKTVRFGDYITIHHLFAFQYDKETKIGEFEKLFLNKIKLIKQKYEYSKIEILDFLNTKNQTEKFITKPEILDRLKNMAYCLQDILKIINIFCDEGKNGSNGDASFLKDLEGIRKLLEEKNIEEVTTEIIRQVNQIINPKAHHYKFTLNFKAKNPNIQLSGNDTFLSEQEIQEKLKTEMDNLEKNKKDKSDCQSYISKFENIIDEILINEIFKNKTKFIDKINNNKKFIDEAWDKVKNKQGFPDNFEEVFLKYKTNIKTKKSLDTDIASNQNERNNYAVINQLKAALRNSKNTHFGVILEKNKNYFLALESKILNKKLKADNKYILKNLENKNNFCQLLTYESLTWKAVEKLCLLPTSLLNGKNDEIIKYWSKFCKGEIITENKKDGDTRDLLNIPKIRKYLSEIVKQNKLSKFFNKNEFEKCVTLDDMKSYFDDNCFVNNWIEADWDEIYKLDENGKIDLYQIFNKDFELEESFATSKNDKEIVKRRKSAQEKLGNDFVSKQLNTKRRRTLFTTYWSNCFDGFDTEKYRLQPEGKVCIRNISPINNSVRYTEEKVLGDFGILFNPITKIVDQSSKKGKERIENFNSYLQKSIPKDEMYIIGLDRGENSLVSYALVKFKKKRLETDDISVRFDNEIGEKSWVLDEILEVKELSAVKVFNQKGKWKKSEFVEQKEDFNFVQKTGENYDEELNKKNAEFKKEELKKQYPNYKNRKGEDKERVIIIPMRQKEKEKAXVRQIKTGAYSVKICSWKEDDGSIYNYRVAQEIIKEERFRQRKKQKEDNLIDTEKFKNGYVSNFVNFIAAKSAEYGAFVSFENLNISGGKDGNLEKTFGASVYQVIENKLMSKLGYLVQKSIPNNHLQFVPKIKRIEELNKDIVSENNKNKNYQLGFVQITNETNTSKLCPNCGYSKNRYKSAEIEDEMINLELKDLKLQNEDFGINTFKKIKFQIDNDIKAWRYAGVTTEGLDLNHKDFCKVISDPRQNIKKSKDFIRCVSCGFDSQFPEKNHSKFEKINGGDVLAAYNIAKRGLEFITQKNQSXPSSILHAIILHKNWISIKFXLNSLLFINKKICYNR

SEQ ID NO: 105 - protein, 1194 aa, Unknown
  metagenome-derived sequence
  MISC_FEATURE (1)..(1194): Unk58 Cms1; Xaa=Gly
MQEFKNIYEIRKSLRFELLPTNNEDILKPKNIDYDLNEFVEKLKDFLYKFKNTIFYYSEEQDIEKMNFRKXLEIKYVWLKNYTKNDFYNXTKKKDKTYKLNEIIYLKKYFFYFFDELYEIILNLEEIVQLPKENQGRKSNIAYYLRKLNKKDVIDFIYDFLKYIHNPQNPKTDKFLNDLKEQIENIKNTLLELNKQFLPLQSSXLEVAKATFNYYTIDKYSKINFDKQIENRLNELYKSIFKLNNHRLFKVWINKEKRNFTITNKFLEKIXFFDYLEKERNFLNFLLSKLEINKEEIENKIKILDKVLVNKDFKVLNLDEAYELIKEFKANAKSHFTSDLXAFEFRKFKIPYSKITKENKKDNIEGTLEINYENFLNIHPLFEISDDDFKKLKELTEEINNYSLKKNNILQKLKLKKSKLEAQIKSKQKENXELNKEEKDFLEYDNKIXELTQKRXKYFNKPXEKVYSWNYFYINEFFKNIALERGRIKAEIKXLEEEKNQARLLKYWSLITEKDESKYLILIPKGNRXNVKEKLEEFXEEKNDVTIYYFKSLTLRALQKLCFKSREVNTFMWGKNXVAYELLQINLDKGYININKKXKKLLKRYDELKNEEQEVIQFYQDVLKSKNANKQLDLVDFGXLDEVLNKNYSSIEDFRIDLEKVCYVKIPKQISKEDYDKLLEKNNILEFEITSQDLRIQKENYENLKNHKNKEHTKKWLNFWSEENNNKNYPIRLNPEIKILYREALQEKKXDYKNRYTKEQFTLTTTLXFNIPSKKFDFSFNDTRDIKEKIDNFNNKFNKEFNXPWYYGIDRXINELATLTVVKWTDETYNTNXIQINKPEFAEIEVYKLKDENKKLKIINYKXEEKEVNIIDNISYFLDQENLFEKIITSTIDLTQAKLINXKIVLNGDKNTYLKLKKLSAQRRLFELFSKNLIAKNSQFEAXKKILFVKRNDNNYEPIYWFTEEQKKNKELQKDIIEELKKYLEDLENKNIFEDTETIEKINHLRDAITANIVXIIYFLQKKYPXKIYLENLETKAPQQETFSFKKXKSXDYTEIEEKMIDGHFRQSNTDISRRLEWXLYRKFQESXFVPSNLKQTILLKDEFKQYQFGIINFIKVKATSSTCPYCEIVTENKXXLKKHIKEDNNCKLKSNFQEDKDKIKNCIYKDLYNNYQINYDSIASYTIAKFGKKNLFN

SEQ ID NO: 106 - protein, 1268 aa, unknown
  metagenome-derived sequence
  MISC_FEATURE (1)..(1268): Unk59 Cms1
  MISC_FEATURE (1)..(1268): Unk59 Cms1; Xaa=Gly
MINLESFKNLYEVRKTVRFXLNQPRKKSDINKTHXLLKDLVEISFEREKKLINNENNHVLIDTEKVLIEKLQQYVNXLEVQLKNWKXVYQRYDLIAINKDYYKILARKAKFDAMWEITKFDKKSNKYIKVKQPQASQISLSSLKIXNRSDSIIQYWXEISQKTDYLLNIFKPKLEQYERAINDANSAHIKPDSIDFRKTFLQLLKLTKEFLQPLLDRSIIFELSKKKVSQEIEKISEFAXEKNNTKIYNVLKNXEELRQYFEANXSQVPYXRVSLNYYTAVQKPNNFDQEIKKAIDDLXIINFLKKSDSQMIDYLHQGSKQKIKLLLTSKHPYPIELLQLFKVKPIPFSVKYNLAKFIEKNYKNEISLSYEEILDKLNLLXRAIDIANDFKNSNNQNNFSLDEYPVKLAFDYAWENTARSLKRTIPFPKEVCKQFLKDNFDVDVDNADFKLYANLLFIADNLAIIEYNNPNNEVELINKIKQAFDSIDFSFDKERYXXYKNDVLVLLNKAKSQRDYSTILKAKQELXLLRXXLKNKIKKYRDLTQRLIDKKNSHFXIASFVGKTLAKIRDRLKEENELNKISHYGVILEDKNQDKYLLILQLDGKDTREKISQKLGNGDIKVYQVNSFTSKALNKFIKNSXSEDAKKFHXDFRYKHKEVSIYDEKGKWTXYQESFLSHIKKCLIDSEISREQNWEAFGWNFAGCNTYEEIEKEIDSKXYQLTENSILKETLGKLLKDEGCSLFPIINQDISSQKQENKNIFTLDFEKVFEXKEYRIHPEFSIFYRKPMEEHEKENKSXIINRFXRLQLLANLGIEFIPRNSSFKTKKEQNRIAIDQKKQNQLVQEFNQEKVNTYFEGLDNYYIFGIDRXIKQLATLCVTDKDXVIQSFDIYTKFFDSKEKIWKYTKTRTEGVLDLTNLKIESDKNXNTYIVDISLFDAKDEDXNPTGTNKQNIQLKQLAYIRKLQYQMSANEEXVLTFLGKYKNKEEREQNMKGLITPYKEXKNFADLPMDIFQEMFENYYRLKTDQNLSESEKKNLMKITTELDASESLKKXVVANMIGVIYYLMKKYEYKVKISLEDLSNAWFFSKDGLSXDVVLNTKNDETMDLKKQDNLALAXVXTYHFFEMQLLKKLFKISTEEXVLHLVPSFXSVKNYIEIMKIKGKYVYKQFGIVYFVDPRNTSRKCPVCXKXXKKYISRVDNIVTCKNCXFDTSSDNSILINNYEKQXKKLHFIKNXDDNGAYNIXEKIRELPKKSDVKNTSISXNISFS

SEQ ID NO: 107 - protein, 1107 aa, unknown
  metagenome-derived sequence
  MISC_FEATURE (1)..(1107): Unk60 Cms1
MNKNNMQKMRDCKIPFELRKTIRFNLQPKILKRPHELTENDNDSLTEQIAKFTNEYEFVIQNLERLVFFTSEDGQKKELRKKVYVKHAWLRNYTKTEFYDGKDCILYNKNGIKRSNQISIADNNVKFLENYFTNWINENNECVQKLQRYLERPEYKQKRFSEFAYWIQKVLKRSNFEAIFELFNSNIQHKSSDKDISAIKKELVAIKPLLKSLTNELLPSQSLGVEIERASFNYYTVNKKPRNYSEEIKNKEQEKNKKLFSFNKQSKKMFILDNKIKFLKEDIRQLNDDYFVEEIFSKEKKVIKDFNHLKISKAYKFLKEYKANEKSRFYELLESGKTSEEIKAECPLFECSDKNFNKIKDLTNRIERTKDEDLRENLKEERGKHFDVVGEEGNMCSFDKYKKFCALFQKIAMQLGRVKANVKSLEKEKIDAERLQSWAVILEKDNQKYILTIPRDSWGNLREAKWFIDSLQNESSTEWKLHSFESLTLRALDKLCFGSDNTFSLAIKGELKIKNSVFFDGEKIKRKDQFSKDGLELIRFYQTVLELETTRKTLAIENFKGLAEVIEKDYENKEDFEKDLKKACYYKKTVLISEQTKNEIIEKYQGNLYKIISYDLEKDDHEDIAKLDNKKEFNRNNLETHTKYWLYFWTRENAKSNYHVRLNPEFRINFVEERTGELEGKQLGALNKNRKKNNKFLLSTTITLWAHEKNIDLAFKTTDEISGFIDSYNKKFNQKIKPFDIYYYGLDRGKRELLTLGLFKFSETEKVQYIMENGVVGEYNKPEFIDIAAYQIKPEKYLEKNDKGRVVYKSASEFVEDSDVVEKISIKSCFDMSCAKLIKDKIIINGDIATYLELKLVSALRKIYEGTTRGKFMSDNICFDAEKGALFLNIKNKGELKNEYLYFYDDRFKNILSLEKIKEELQNYYDALREKKAVEIIEINRINNLRDALCANAVGILSYLQKRYFGMMCFENLNLENKNKRISEFAGFLASRIEWKLLQKFQTLSLVPPIYKQAMTLQSNGKINQLGIVAYINTEGTSSECPHCGTKNSDKSDKWHSHAYKCKNTHCNFDSSDKTKRRGLVGLDNSDSVAAYNIAKRGLQKVVEGTV

SEQ ID NO: 108 - protein, 1148 aa, unknown
  metagenome-derived sequence
  MISC_FEATURE (1)..(1148): Unk61 Cms1
  MISC_FEATURE (1)..(1148): Unk61 Cms1; Xaa=Gly
MTMVNLESFKNLYEVRKSARFKIVPKKIFRQKEDRGSIYNTEDIVKQYKGIIKDLESILYYENFVPEAEPLSNKLXDLCDFSKFESELEENQEISSLKNKESSDLIRIKHAWLQKYFTNDWHENKDFIISKRLDRKRNIEIKTKNWTTIXSVNFLKEFFENFFTDANKYFNVISKLLQVQDFEKNRQSDIKFALQTIQXKDHLYKIYQLFEXGYIEHKNDNTSINELQEKLKVFKNNVNNYIENCRINDSFGLPLEYVSLNYYTRRKTQKDYDEEILKKSESLKKKFDXDLXELYXISKESEISDLYNNMKLFKANQKSAFLQLLQSQTPFSKLKNNFEYIDNKGERYSDYKIQLFNDITEENYKEMKDLTSKIEESDNKQTRKALKEKRXKYFLFHCKKYNNFCDYYKKVAMEFXKRKAEILSLEREKILAERERXYGFLSRDASNNYYINTFDIENTKNAYDFFSNQSQKQXEITYYILSSITLRALEKLCFSKSSNFYKXNIVQKIDEKFLKIQEATGNKIFKSKRELEEGENLIEFLAEVLRLQNTLXIKFKSEKSLDKLKGCENISDFEILLKKETYILDEYKISKEDFEKALEKFKXNSFLIIDKDSDNHNKNSVFSQWWTRFWKKNNTENYILRINPELVISFRKXDEERFKNKISFHRKKNDSYMLTFNFSHFSDKSYINSEFIDDIQRKENLERFNNLYNNNVDLDYFYXIDKXTNELVTLXIYKKNXGLMDSVKISEKIPVYKITNKXLAHFEYIVNEKTXKLVIDKDTXEEKKRYLSKNVSYFIKDLENKELFEQLEISSCLXDLTYAKIIKXNIILNADIFTTVNLYKVTAKRFLNDATFRGKIKNNTVLFDDENKSFYFEYENRXKLQKQNIFYWKDDFDYLPCDDIFQNLKEEVENELNMYLTSISNEEDISMQRVNNYKNAISANIVGIITELQKHFNGYICYETLDAGQIEQKXLNTFIXNTLNEKIYNKLQLSLEVPPILKKFRTDIXTKEIIQHXKIIYVNEKNTSSACPICNEQLLNXNLSDKKDDEVFKLXXHLSDFENNMKHLTDLDYQEWLKNKSFKKANTNKKXEIEKNKYNSXTINXKSCDYYIGNENYPEFEFIKSXDDLATYNIAKKAKEYLESLSKKEDSE

SEQ ID NO: 109 - protein, 1123 aa, unknown
  metagenome-derived sequence
  MISC_FEATURE (1)..(1123): Unk62 Cms1
  MISC_FEATURE (1)..(1123): Unk62 Cms1; Xaa=Gly
MLENLTNLYEVIKTLKFELKPSKFTLKRCDFDRAFEADPHALFEKLRSVHRFQEQILDLLXKTSSKKIVIHKNLIKLIDADYFYQLKSKAISSNNTIAVLSQDFQEEFFNYIKEKFNRLHSTNYSLDYLLWADYLENPTTIDKKPTKSEIAFATKRYVHAIEKVEEILSNLIYKTXNIDREIESLLANYYNNQDLKPLLKVAKSYLQSYSPTSXFQVSKFGFNAKAIQKKVDVEKMEQEIXSLEKKMLDLEEKKIIATQIFDDYAKKFVQEKIKSDPKLLALRENQTASLDEIKRAKEYLKYLKEXDFDYQKILKERSKARKEKRDSMIKFTXDREYCELKLAKTDASVVYGRAKQAFFAKQQELYSQQALTHYARILRSEXNYFVAMIDRDDVSFLERLXTNDKVNNEKFEILRYASLTARAVEKLIFEKNALKFNIYDKEYKECKMIREKRSYKEKXNEDSRSKNEKQKENLKKLVLFLNSAIEQLNKKLEXXIFDWKPFLIXNDFDNFSEFQKYITENCYIARREAIDKQTIYDLDQKXKLNFYQIFNKDFSVDPYCATTERDRSSTIKNINLQSKKNLFTLYWQSLYTENSXTIRLNPESNLYFRPSRVRTEIDLCNDCEASKLRYRQNKIIGDFQLVFYPTKELPFDQLQQKILKNSEKSYAIGIDLGENSLATICLVDNEKKVVLDGNNKPIIKDLSMINNKXDFVEVEDCFIDXKPYERKQKLLIXGTETKPYMLGRHFPKHLQNKVIAEMSQDMLFEVLQILESLAPEKLXIVDKQXNKVFDYNYAFEHLKAINKIRYHLQVFNHTNDEMRILEKDLLASIKIRXXFVXKIVSYITQMAKKYNAIIVFENLDQEIGRIKXRYLFSEQSYAKVSPKEERMYKGISPYQLMQDKIIQKCNYLLTKQEIKGXMQISPRLKRQEDIKQLTLLKDKNCAWGKIIFVNEEDSSKECPNCGFVPXKYSSNINIKDDXIELMANKKDKKVFSFAENQLLSERREAYQKISDIDKKKALLIETRVXKTFLKSYMDIQGDPMICVNCGYDTRKTKRVEKYNLKSCDEIAAYIIAKRXLEFMENKXYETQEVSISVGXDSYNKPSDGEQDDSCASGVKLSXNISFS

SEQ ID NO: 110 - protein, 906 aa, unknown
  metagenome-derived sequence
  MISC_FEATURE (1)..(906): Unk63 Cms1
  MISC_FEATURE (1)..(906): Unk63 Cms1; Xaa=Gly
MEKNYKSEINLSYEDILNKFNLLXRAIDIANDFKNSNNQNNFSLDEYPIKLAFDYAWENTARSLKRTIPFPKEVCKQFLKDNFDVDIDNADFKLYANLLFIADNLATIEYNNPNNEVELINEIKQAFECISFPFDKEVYKXHKEAILELLDKEKSQRDYSTILKAKQELXLLRXXLKNKIKKYRDLTQRLIDKKNSHFXIASFVGKTLATIRDGLKEENELNKISDYXVIIEDSNQDKYLLTLELNGKDIRDRIRNSLXNXEYKTYEVNSFTSKALNKFIKNPLSEDAKKFHGKYKDEYSFXYENKDXDFTYKITKVSKYDEQGKWTXYQESFLSHIKKCLIDSEISREQNWEAFGWNFAGCNTYEEIEKEVDSKXYQLTENLISMGNLKSLVKDEGCLLFPIINQDISSQKQENKNIFTLDLEKVFEXKECRIHPEFSIFYRRPIEEHKKENKSXIINRFGRLQLLANLGIEFVPRNPSFKTKKEQNRIAIDQKKQNQLVQEFNQKKVNTYFEGLDNYYIFGIDRXIKQLATLCVTDKDXVIQDFDIYTKHFNSESKKWEYKFHRKDXILDLTNLKIESDRSXNKYIVDISLFQAKDEDXNPTGTNKQNIQLKQLAYIRKLQYQMSANEEXVLNFLGKYKNKEEREQNMEELITPYKEXKNFADLPMDIFQEMFENYYRLKTDQNLSESEKKNLMKITTELDASESLKKXVVANMIGVIYYLMKKYEYKVKISLENLSNAWLFSKDGLSXDVVLNTKNDETMDLKKQDNLALAXVXTYHFFEMQLLNKLFKISTEEXVLHLVPSFXSVKNYIEIMKIKGKYVYKQFGIVYFVDPRNTSKKCPVCXKXXKKYISRVDNVVTCKNCXFDTSSDNSILINNYKKQXKNIHFIKNGDDNAAYNIXEKIR

SEQ ID NO: 111 - protein, 910 aa, unknown
  metagenome-derived sequence
  MISC_FEATURE (1)..(910): Unk64 Cms1
  MISC_FEATURE (1)..(910): Unk64 Cms1; Xaa=Gly
MEKNYKSEINLSYEDILNKFNLLXRAIDIANDFKNSNNQNNFSLDEYPIKLAFDYAWENTARSLKRTIPFPKEVCKQFLKDNFDVDIDNADFKLYANLLFIADNLATIEYNNPNNEVELINEIKQAFECISFPFDKEVYKXHKEAILELLDKEKSQRDYSTILKAKQELXLLRXXLKNKIKKYRDLTQRLIDKKNSHFXIASFVGKTLATIRDGLKEENELNKISDYXVIIEDSNQDKYLLTLELNGKDIRDRIRNSLXNXEYKTYEVNSFTSKALNKFIKNPLSEDAKKFHGKYKDEYSFXYENKDXDFTYKITKVSKYDEQGKWTXYQESFLSHIKKCLIDSEISREQNWEAFGWNFAGCNTYEEIEKEVDSKXYQLTENLISMGNLKSLVKDEGCLLFPIINQDISSQKQENKNIFTLDLEKVFEXKECRIHPEFSIFYRRPIEEHKKENKSXIINRFGRLQLLANLGIEFVPRNPSFKTKKEQNRIAIDQKKQNQLVQEFNQKKVNTYFEGLDNYYIFGIDRXIKQLATLCVTDKDXVIQDFDIYTKHFNSESKKWEYKFHRKDXILDLTNLKIESDRSXNKYIVDISLFQAKDEDXNPTGTNKQNIQLKQLAYIRKLQYQMSANEEXVLNFLGKYKNKEEREQNMEELITPYKEXKNFADLPMDIFQEMFENYYRLKTDQNLSESEKKNLMKITTELDASESLKKXVVANMIGVIYYLMKKYEYKVKISLENLSNAWLFSKDGLSXDVVLNTKNDETMDLKKQDNLALAXVXTYHFFEMQLLNKLFKISTEEXVLHLVPSFXSVKNYIEIMKIKGKYVYKQFGIVYFVDPRNTSKKCPVCXKXXKKYISRVDNVVTCKNCXFDTSSDNSILINNYKKQCRFFLHKKTRLFSLVFQIYHDNVPKCN

SEQ ID NO: 112 - protein, 1103 aa, unknown
  metagenome-derived sequence
  MISC_FEATURE (1)..(1103): Unk65 Cms1
MEKYQITKSISFRLNKVKAPILEEQVEKIGDVKEAEASLLRLFSVGQDLAGLLKQYIYKDNQKLKSSVTVHFRWLRDYTKDKFYNWKTESRRDFSREKRFKLSEVDYLKEVFEHFISDWDTIIQNLGSEISRKQEALSRKAEIGKIIKRIGTRNVFLFFENLIIESKDKNEIHLEAQLNEKIKVFKENLIKAEQWALPAQSAGIELAKASFNYYTINKKPKDFELEKRNLEKQLHNYDERFMKDIAQRENKLFGELRIIEKDDATNMYRFLYELIQNGEGKQVLEKTDKGLTVDLDSLYKNLKVFRAEQKKSFQEAVSKGSSYDDTAKINILFSSVDQKNNEKNLKAFNKYKEFTDTIQKLADQKNKVERDSLNSQKLQEEISRIRQYRGKLLFQGPSKRGEPEERFDKYLKFCKVYKDIALKRGRLVARLKGIEKEKIDSQRLKYWTFIVEKDKQHQLVLIPKSQSQKVYQKISSYESLGAGSSDIYYFESLTYRALKKLCFGVNGNTFIPEISEELRKAGKWNYEERDFGEHIFKIRSGVEEIRDEKRLIAFYKDVLGTDYIRKNREGGKIVLPSSFDEEVLIPEFSTEQEFHAALEKCCYLRKKKIPKDDIEKIFSECSAQIFTITSYDLEKQNKTNLKAHTKLWFDFWTGENEAQRFPLRLNPEIRILWREPKATRVEKYGKDSKLFDPKKRNRYLHPQFTLTTSFIENALHPEINYRFLDAKQKKENVKKFNMDIYAKLKPLPKAWYYGIDTGIVELASLCLIQKNGIPQTFEVLNLKEDKMNYDKTGYLKDGTKKKYKAIQNLSYFLNEDLYKRTFQDESFLDTFAEIFEKKEVSALDLSVSKIISGHIVMNGDITARLNVALANARRKIVDALIKNPSVQLSEQDYNIKVGDEIIFKGRIEFNAIKSWEDIQAIIHSSFEKDKENLARVQEDINKYRQVIAANVTGVIHFLYKKFPGLITIEYLDQSEVESHRKDFEGIIDNPVERALYRKFQTEGLTPPVSELWSIKNKNEQIGIIYFADPKDGKKGAHGIRCPKCGEKAYPRSEDDGYKKDKNNKIFQCKQCGFHNLNNSMGLLGLDSNDKVAAYNIAKRGLEI

SEQ ID NO: 113 - protein, 1271 aa, unknown
  metagenome-derived sequence
  MISC_FEATURE (1)..(1271): Unk66 Cms1
  MISC_FEATURE (1)..(1271): Unk66 Cms1; Xaa=Gly
MLESFKDLYEVRKTERIXLTQPNKKXEKISHLELNELVKTSLERIKSDIDKDDNSIIKNEKNLIENSRQFVNELNVQFXTWKNIYKRYDLISVNKDYYRILARKAKFDAFWKEGRTKYPKANQITLSSLQKXGRKEKIIEYWKEIIERSYYLISIFTQKLDQYENAVSNPEKLSHTKPDFTDFRKIFLQLLKVSEDYLKPLFDKSINFKTXKKLESEEDIKEINLFISEENNKNIYSLLKLXSDIREYFEENXAQVPYKKVSLNYYTAVQKPNNFEXEIKKAIEDLWIVEFLNKSDSQIINYLHQGSKQKKKLLLTSKHPYPIELLQLFKVKPIPFSVKYNLAKFMEKNYKNEINLSYEDILNKFNLLXRAIDIANDFKNSNNQNNFSLDEYPVKLAFDYAWENTARSLKRTIPFPKEVCKQFLKDNFDVDIDNADFKLYANLLFIADNLATIEYNNPNNEVELINEIKQAFECISFPFDKEVYKXHKEAILELLDKEKSQRDYSTILKAKQELXLLRXXLKNKIKKYRDLTQRLIDKKNSHFXIASFVGKTLATIRDGLKEENELNKISDYXVIIEDSNQDKYLLTLELNGKDIRDRIRNSLXNXEYKTYEVNSFTSKALNKFIKNPLSEDAKKFHGKYKDEYSFXYENKDXDFTYKITKVSKYDEQGKWTXYQESFLSHIKKCLIDSEISREQNWEAFGWNFAGCNTYEEIEKEIDSKXYQLTENSILKETLGKLLKDEGCSLFPIINQDISSQKQENKNIFTLDLEKVFEXKECRIHPEFSIFYRRPIEEHKKENKSXIINRFGRLQLLANLGIEFIPRNSSFKTKKEQNRIAIDQKKQNQLVQEFNQEKVNTYFEGLDNYYIFGIDRXIKQLATLCVTDKDXVIQSFDIYTKFFDSKEKIWKYTKTRTEGVLDLTNLKIESDKNXNTYIVDISLFDAKDEDXNPTGTNKQNIQLKQLAYIRKLQYQMSANEEXVLTFLGKYKNKEEREQNMKGLITPYKEXKNFADLPMDIFQEMFENYYRLKTDQNLSESEKKNLMKITTELDASESLKKXVVANMIGVIYYLMKKYEYKVKISLEDLSNAWFFSKDGLSXDVVLNTKNDETMDLKKQDNLALAXVXTYHFFEMQLLKKLFKISTEEXVLHLVPSFXSVKNYIEIMKIKGKYVYKQFGIVYFVDPRNTSRKCPVCXKXXKKYISRVDNVVTCKNCXFDTSSDNSILINNYEKQXKKLHFIKNXDDNGAYNIXEKIRELPKKSDVKNTSISXNISFS

SEQ ID NO: 114 - protein, 1209 aa, unknown; identical to SEQ ID NO: 80
  metagenome-derived sequence
  MISC_FEATURE (1)..(1209): Unk67 Cms1
  MISC_FEATURE (1)..(1209): Unk67 Cms1; Xaa=Gly

SEQ ID NO: 115 - protein, 1268 aa, unknown
  metagenome-derived sequence
  MISC_FEATURE (1)..(1268): Unk68 Cms1; Xaa=Gly
MINLESFKNLYEVRKTVRFXLNQPRKKSDINKTHXLLKDLVEISFESEKKLINNENNHVLIDTEKVLIEKLQQYVNXLEIQLKNWKXTYQRYDLIAINKDYYKILARKAKFDAMWEITKFDKKSNKYIKVKQPQASQISLSSLKIXNRSDSIIQYWXEIIEKTDYLLNIFKPKLEQYERAINDANSAHIKPDSIDFRKTFLQLLKLTKEFLQPLLDRSIIFELSKKKVSQEIEKISEFAXEKNNTKIYNVLKNXEELRQYFEANXSQVPYXRVSLNYHTAVQKPNNFEQEIKKAIEDLXIVEFLNKSEQEITSYLHQDSKQKIQLLLTSKHPYPIELLQLFKVKPIPFSVKYNLAKFIEKNYKNEISLSYEEILDKLNLLXRAIDIANDFKNSNNQNNFSLDEYPVKLAFDYAWENTARSLKRTIPFPKEVCKQFLKDNFDVDVDNADFKLYANLLFIADNLATIEYNNPNNEAELINEIKQAFDSIDFSFDKERYXXYKNDVLVLLNKAKSQRDYSTILKAKQELXLLRXXLKNKIKKYRDLTQRLIDKKDSHFXIASFVGKTLAKIRDRLKEENELNKISHYGVILEDKNQDKYLLISQLDGKDTREKISQKLGNGDIKVYQVNSFTSKALNKFIKNSXSEDAKKFHXDFRYKHKEVSIYDEQGKWIXYQEEFLNHIKKCLIDSDISREQNWKAFGWNFSCCNTYEEIEKEIDSKXYQLTENSILKETLGKLVKDEGCLLVPIINQDISSQKQENKNIFTLDFEKVFEXREYRIHPEFSIFYRKPMEEHKKENRSXIINRFGRVQLLANLGIEFLPRNSSFKTKKEQNRVAIDQKKENKLVREFNQEKVNTYFEGLDNYYIFGIDRXIKQLATLCVTDKGXVIQDFDIYTKHFNSGSKRWEYKFHRKDXILDLTNLKIESDRSXNKYIVDISLFQAKDEDXNPTGTNKQNIQLKQLAYIRKLQYQMSANEEXVLTFLGKYKNKEEREQNMKELITPYKEXKNFADLPMDIFQEMFENYYRLKTDQNLSESEKKNLMKITTELDASESLKKXVVANMIGVIYCLMKKYEYKVKISLEDLSNAWFFSKDXLSXGVVLNTKNDETMDLKKQDNLALAXVXTYHFFEMQLLKKLFKISTEEXILHLVPSFGSVKNYTEIFKDKGKYVYKQFGVIYFVDPRNTSRKCPVCXKXXKKYISRIDNVVTCKNCXFDTSSDNSILIKNNKKQXKKLHFIKNGDDNGAYNIXEKIRELPKKSDVKNTSISXNISFS

SEQ ID NO: 116 - protein, 1188 aa, unknown
  metagenome-derived sequence
  MISC_FEATURE (1)..(1188): Unk69 Cms1
MASICTGEREVINMEQYKITKAIRFKLEPKHISKIKSDVGAIELKNKFNLASFISSLGSFISQFNEYIFYESRNNEFIIKGNLTVKNIWLKQYAKQEIVGLKLKRGQTIGDIKGLSDKIRKARDEVNDIYLKLCDETSKLNERANRAKKGLLIKRLNARNSLPLLLSLIENTTDKNETGNLSIQLKQLGAKLQSQLDSGVNMYLPAQSNGLPIAKASFNYYTINKKPIDYDYGQKKQEQIDKLEINLDSNFDSLIPQHINISNNLKQAIKSDISDIAKKGKDNTLLLGDAPFVNHDYVSIRQILKNIKAEQKKIFSEFIPRDDSTFKNLKTNSRLYLFNDISGEEFNDYKHKTRVIEEKAEKKNQCNNDELKRELNSELQNLKKERGSLINAADRNTKGKFKTYKAFANIYGKVARDHGRILSTLKGIEKEQVESQLLKYWAVVIEENGQHSLALIPKKNAEEFKKWLENNASTSSVSPIKTYWFESLTLRSLRKLCFGYIENQTHSNTFYPELKKSPELENYKDDRGDFIRGEFFFEGDEQRLIKFYKDVLGSQHAQKVLSFPKQQVKDDIIDKQFNTLDEFQIALEKVCYRRFVLCSSDIKLKLKEYEAEIFGITSLDLRNATKTNIKNHTLIWRMFWNTKNESNNFDIRLNPEITLTYRSPNSGRIEKYGKDSELYDERKNNRYLHPQYTLVTTISEHSNAPTKIMSFMTDDEFKTSVDAFNQKLKKEDVKFALGIDNGEAELSTLGIYLPVFNKDSNSEIWKLFKNVSEYGFKFLTIRNLSYSEIDANERKRKIIQNPSYFLNKNLYMGIFGRTEQDYDQMLEKQFEEKSLLSLDLTTAKVINGHIITNGDVPTFFNLWMRHAQRNVWDMNDHSKYKTAKKITIKNNDELTEAEKAKFAEYISDGKKYEPLTAKEKSKYLKWIFENRNLLQFTDEEKKKFDNCQRRKDNFSKNILFAVCSIGTDIYSVTDVFDVRHIFKKRKNFDVLKSEAEIIKEIESYNTNKSIRKISNEELDLKINHLKQSVVANAVGVIHFLYNYYKEKTGGEGLIVKEGFDTKTVADGLEKFSGNIYRILERKLYQKFQNYGLVPPIKSLMAVRGGGIKDNGLSKTIRLGNVCFVSQSKTSGICPLCNSKKLDHNTTCPDCQSDLIEIFHSNNGVAGYTIAKRGFENFNNNSNKGVSEK

SEQ ID NO: 117 - protein, 1129 aa, unknown
  metagenome-derived sequence
  MISC_FEATURE (1)..(1129): Unk70 Cms1
  MISC_FEATURE (1)..(1129): Unk70 Cms1; Xaa=Gly
MMEKLTNLYEVIKTIKFELKPSEFTLKRCSFDSSFESDPHVLFEKLKPIHKQQKEILNILSNLPPQKIVIHKNLIKLIDSDYFYRLKSKALSANNTLVVLSKEFQEEFSNYIKEKFDRLHSTNYSLSYLLWADSLEKPSNTDKKPTKSEIAFAVKRYVHAVQKVEEIISNIIYKTXNTDNELKTMLKSYYDNKDLXYIFSIANRYLQSYSPTSXFQVSKFGFNAKAIRKKVDVEKMEKEIRILETKMLDLEDKKVIATQIFDDYTKKFVQEKIKTDPKLVALRENQTASPNERKQAKEYLKTLKEXDFNYQKILKERSKAKKEQKKYEPKFTXDKEYCELKLAKIDASVIYGRAKXDFFAKQQELYSQQALSHYARLVRNXEKYFVVMIDRDNINELDNLXDNQIKNDDYFEILRYSSLTAKAVEKLIFEKNALNFNRYDKEYRDCKNIREKRTYKEKGSEDSRSITNDQKTKLRKLVSFLNEAITQLNKKVEXXVFNWVPFNISNEFDDFAEFRKYVTKTCYITKWESISKQIIYDLDKKXILDFYQIYNKDFAVDPYFAKTERDKNRIKKDISIMGKQNLFTIYWESLFGDNSSNIRLNPESNLYVRPAKVVEEISDHNPNYETSKLRYKENKIIXDFQLVFYPTKELPLDKLQKKILDEVDKSYAIGIDLXENSLATICLIDNEKRVVLDEEGKPIIKDLSMINNKXDFVELDDCYIDXQPYKRKQKLLVXGQGNKPYTLGRYFPEKFQNQVISKMSKETLIEVLKILEDIAPEKLXIVDNHXNKVFDYNYAFEHLKATNKIRYHLQAFDHTNEEMEILEKDLLASTKIRGXFVXKVVSYITQMSKKYNALIVFENLDQEIGRIRXMTLFSEQEYEKVSAKEERMYKGISPYQLIQDKIIQKCNYLLSKQDNTKXIQISPRLKRQEDIKQLTLLKDKNCAWXKVVFVNEENSSKECPECXFIPXKYSSNINIQENXIEIMANKKDKKLLLFENNPLLNERRIAYQSIPDTNELKKKSLLIETRVGKTILTETDMKIVXDPMICVNCGYDTRKEEWVKKYNLKSCDEIAAYIIAKRXLEFVENKXYENQSIDKPSQTNTFEENKKSKNSDNENSSYTMSGNINFSHS

SEQ ID NO: 118 - protein, 1135 aa, unknown
  metagenome-derived sequence
  MISC_FEATURE (1)..(1135): Unk71 Cms1; Xaa=Gly
MLSKKNKKXIKQPQANQISLSSLHDKKDLIINYWENNISESDFLINIFEPNLKKYLDALANPDKYSHTKPDLIDFRKTFLQLLNVNKEYLQPLFDKSIIFETGKKGESKYINEINEFAXNENNLKIKELLDLXEKIRQYFESNXLQVPYXRVSLNYYTAVQKPNNFDDEIKKXIKDLXIIEFLRKEESEIQVYLNQESKEKIKLLKDSKEPYSIELIQLFKPKAIPFSVKYNLAKYIEKNYKKELGLKYEDILYKFDLLXRSYDIXKDYSECTEKNTFSLMKYPIKLAFDYSWENLARSLKRDIDFPKEICKNFLKDNFDVDINNSSFKLYADLLFIAENLATIEYNNPSNEKEIIDNIINTFQIINFEINGYKKKDYENHKTAILSLLEQGKNERDFKSNVFIEAKQKLXLLRXXQKNLIAKYKELTEKLVDKKDIHIXIASFIXRNLANIRDGLKEEHELNKITDYXIIVEDNNNDKYLLLLRLAXKDNREQLKSKLXDGEIKVYEINSFTSKALNKFIKNPXXEDAKKFHXNFNYKYRDISTYSHEXKWIGYKPDFIKHIKDSLCNSEIAKEQKRVEFGWDFDKCNTYEEIIKEIDSKXYNLINNTISKKNLEYLIENDNCLLLPLINQDISSKKTINKNAFTIDFERAIDXKSXYRIHPEFSVFYRTPMQEYSKENKFXIVNRFGRLELLANIGIEYVPSNKNYTTKKEQNKISLDKDKQNNLIKEFNEEKVDNYFDSLDNFYVFGIDRXIKQLATLCVMDKAXVIQDFDIYTKHFNNTQKKWEYKKNRTEXILNLTNLKVESDQNXTPFLVDISLFESKNENXKSFGTNKQNEKLKQLAYVRKLQYQMSFNNESVLNFIKKHTTQEARAENIXELITPYKEXKQFADLPIDTFEEMFENFHQLKTNENLSELEKQNLMKLTTELDASEELKRGVVANMIGVICYLMKKYHYKVKIVLENLSNAWYFSEDXLTXDALLNSKNDXITDFKKQENLALAXVXTYHFFETQLLKKIFKISIEEKILHLVPSFXSVKNYTYLIKNNKSQYVFRQFGIVYFVSPKNTSFKCPICLKSGREYITRNDNIITCKSCGFVSXKDNDEILKKYTKTHLNIHFIKNXDDNGAYHIXKKLLK

SEQ ID NO: 119 - protein, 999 aa, unknown
  metagenome-derived sequence
  MISC_FEATURE (1)..(999): Unk72 Cms1
  MISC_FEATURE (741)..(741): Xaa=Asp or Asn
MVPQYEFTKTIRFTLNGENTTFLLDKDINWQKTLNFNDFQISFNDLLNQFKKTVFYINNNGKLVVKNSLEIKKSWLRQYARDEFYKFNENQRKYNKFPAKLFQPIFNDWFKRNKSLLRQFEKINQMPQESQIKRSEILTLLQEIKIADNFLFIKNFVQPGIVNDKKSDYNLEDLKEKVNRFEELLNKAIFAMAPDLSQGAEVCRASLSYYTVNKISKRDFDKELEYKKQELKKPYNKELNQRLLKMVGFLDYLKSEYQSDIQNISIQNLYEALKQFKSQRKSEFMQAVQQGKQVKELIKDFPLFNAQKDSMQKFIYASKDKRGIYFQNQWGFPNYVNFCNNVFKPVAIKIGNLKAQIRAIEQEKIEARLLQYWAHILKKDNKYYLLLIPKEKMQEVKKFLNSLNFKKEREYTLYSFNSLTLRALKKLIRKNLGKEQIRLQNDNTAIALYKEVFQDKHPKLQNLDFSGFEKDIKKIIQENYNSEEDFRLELERVAYCCFEKKMNQKDIDLMRNKFSALLLEISAYDFERNIMGEMKEHSKIWQKFWTVENKNKNFPVRLNPEIRIFYRPQRQQGDPKKQKNRFAKDHFGVAFTITQNAAQKKLDLAFTKEKEISEAVKKFNKEVIGEFIKERDDNLYYYGIDRGQQELATLCVMRFSKEQGEIKLANGEVKKFDIPIPTPIKLYRIKENHLNGTKEIITDQNGKKKIVRILENPSYFIDEEEKFEEIKSTCFDLTTAKLIKXKIVLNGDVRTYIELKKTNGKRQLFEKLSKIDDNAKIEFCEDENGRRFQIKSKSTERNKYQYIVFYSPQDEKIMSREAMQRDLQEYLDYLRTNNLAKEDISIEKINHLRDAITANMVGIIAFLFKQYPGIINLENLTETHFEKNNENIERRLEWSLYKKFQKFRLVLPKLRQTVILRKEDNQLNQIGIIHFVSPQNTSSSCPVCGNVVPMGKREKDKFKYHIFICDKCGFNTQNPKSPFDFIKNSDEVAAYNIAKIQLK

SEQ ID NO: 120 - protein, 1125 aa, unknown
  metagenome-derived sequence
  MISC_FEATURE (1)..(1125): Unk73 Cms1
MNDDFKNLYEVQKTITFELKSKYIDYFYKNGQCVENKNCFINFEKTSKFMEKNYFSTSQNKGNFDCVLKFLETTDKIVRFADNFATNFSNGNILARGFEVKKKLLEKYDRISFFELKKRKQITVKRKNVNTGKTYDHFLYFSDRMNLENLFEMTNDQHGINFCQYLEKILNRIKLYRAKMENNLTVNNDNEFTFNKNKVVFCSDAKIYFEEFKTLLDIFSLIERDKKVGIYTIDNEVNETNKIIEVFEFINNKYSITLKSNLGSIIEVVNKEAKKPIILTSLNPRVVNKDSKKTESEFQNIQEFEKEIEIEEMEMDAINIKKFEYVELLEKKLKNSLDELKVLKTDIQSLINKKRRNEKLLSNEIALWKEFQFAKTILKYIKLNGVVISNKKNGRGEYQDVFNYRKSGERLNNPKNLLGIGQHPLFHLFKEEYDNYKNLCGEKFRKAKSLGDKKSLYNAVSREVLRQKEMQYLSFLAKDSYFYYLVLIDKDFNKDRKVIDQIGGCTGNWQMLDYYQLTFKALEKLALLGESTFDINNQDITKEVKLIWQNYKEKKFKEYRLCREEKQGLNRFEIDNKKESLQKNELNKLIDFIKKVINKLPDSKKYNFQFKSTEQYKNLDEFKKEIDEQGYFSEWISIDKEKLLQLEKETQKEVLIFKLHNKDFRKVAIDEKRKQNLFTEYWLDAMRLEKEVRITPEIDIFKKNKEEGNVPEKRVLETSQKEVISSARIYQNKLYGAFRLKFYPNRSCSFEKVNEKIKFKDNVCFLGMDRGEKSLISWCLIDNTGKLIKNGDWTKFDDEKNSDKKANYAEKLKIYKEIKECILQDYERIAECIGSEEKQKLIDEVKKKEKELEAKSLLATETIKQGYCGHLIKEINKVLLDYPNTYIVLEDLDIQGKSESRESDITNKMDNLAKTMGATIYQTIENALVNKFKYYSVKTDLEKYDGQQLVPNIVKVEDLRICDKENREYGKQKFIKSKDKIGNILFIDEYLTSNECPNCGFNHEKIKNLNFNFQESDQNYILENNGEKYLFSKDWFKEERVKNVLYDKKIKQIFFPRAVKNPFIKSSKSKKDFFYCSKCQFSSENNLVNLGLINGNYQIKTGDDLAAYIIAKRGLTLILNKKKEI

SEQ ID NO: 121 - protein, 1098 aa, unknown
  metagenome-derived sequence
  MISC_FEATURE (1)..(1098): Unk74 Cms1
MEKFKITKTIRFKAIPQKAERLQAQAEALMDNPKADITVLVIKGFDLINLFEELVYTNDKKEYLRKNITIHFRWLRQYVKNEWYDWKQGKIEIENDNNKAKQKQPQKSNSPFASLLAIRDNFDDAKEKEQTDHTNKTAKNSEDKKLPLGSVPFLKNELQNISSSWRELLDELRKAFERPEENRMRRADIAKFLGGLSTRQMLPALIEFINDLNDKKSEEQINALKKLVQEFKELLETCQNAYLSAQSSGINIARASFNYYTLNKKEKNYTEERQKILNSLSRSFFEKGRVPQIIKDLSIDETLSIGNLYEFLKKYKAEQKQQFQEAVSQGLKFNELKEKFPLFDTIEPIYKDFVAKTNAITQKSTALQNSSQTKDLKDEINKLKRERGQMFQKGKFRKYTELCDVYKKVAQNKGKLKAALIGIEKEKLDSQKLQYWALIGRQNNQYKLYLIPKEKVQEAYAEISRQGRIENEVSTPLYYFESFTFRALRKLCFGVNGNTFIPEIKKAFPEFNTPDFGEHTFRTGNIEQDEQNLIQFYQKVLDTDFVLRNLRLPHSQLQEVIDTKYNSLQEFKIAIEKVCYAKQTVLNSRVLRLLETDFKAQIVELSSLDLNKENPTHLKAHTLLWNSFWSKENEANHFTTRINPEISIYWREAKASRIEKYGKGTPLYDERKKNRYLHPQFTVAFTFNENALSNELNFAFEGFEKKKEALNNFNQQINQEFKKGLENQILGAFGIDTGEAELATIGLTDNGKPFPTKLIRLKTEKLNFEKQGFFKDGTPREKPYRAIDNMSYFLNQELYEKTFRDYLFQETYTEIFEEFETTTIDLTCAKVICGHIVLNGDLHMRTKLNLLNAKRQIRQAQILNPSLEIKFEEDKILMPETDEDKKAITSWKAIYHTNEELEQIQPIKTVNEMLLSYLKEIKVDESIEIESINRYRKVVAGNMVGVIAHLYNKYPILIAIENLAQGTIEKHRLRYQGVMDRPLETALYRKFQSKGLTPPISDVVAIREALTEKKNNKKSQLGVLQFVDEQLTSKTCPNCGKNAYEGSRKELYLKEKKQGIFSCTCGYHNINNPMGLNLHSNDAVAAFNIAKRGIKNIK

SEQ ID NO: 122 - protein, 1175 aa, unknown
  metagenome-derived sequence
  MISC_FEATURE (1)..(1175): Unk75 Cms1; Xaa=Gly
MQKYEVKKTVRFELLPKENTSKPEINNQDYEKNLNEFIKSYEEALHKLQKILFKDDTLNENLKIKLSFLANYTKYEFYKYDIVLLKKXTNNKVSLSSEKLKYLYNLLKSKIEENLNLLKKLKELLGLPLENQSRKSELNFYFSKLTTRDNFEFFHQLAKNLSSEKPHFANEIEKIISKFENIENNNLMEKLSLVLKSTXTFXVEILRASLNYYTVNKKPKDYDKKILEKKEEFNKLIGNFKNKNGKNIFDNNIAQNSXFNSFLEDFDDSYFXGIKDYQXNTKKEKKYYYLSIQNAYDLMKQYKAEQKQAFIQFLAQXKNFEDLQNEFEYHITKEKTKNVKLKLFYGIKEEDFNTMKELTKQIAALVKFKNQLKQKLDDEKKQNLEAEIDSYNKTYGTNYDLSDENLLETIXKDLEKIAKERGKFFQEKLSKYKNFAEEYKKVAQTLXRIKANIVSLEKEKIDAKKLTHWALILEKDNPLQETCRTDSKYKDCKLRYLLFIPREKIRXARKFMDKLNPNPNXKWTLYKFESLTLKALKKLCFGKENNTFRXXIYEEAKNYPELLNEKXKLKELYEIKSDEELIKFYQKVLDLESTKRQIKLEYFDENEFNEEVVNADIKTLKELEEKLKKTAYIKKPIKITENVKNNLIKYNNXQFFKVTSYDLQKYDPEFIEQLEYKDHFDRNHPESFTQLWWDFWTEENEKNXYPVRINPELKVSFIPKQNXFDKSRYGRDRFIVAFNMSINALAXELNLSFKDKDELKNFFENFNQEINTEFKDKPYFYXFDKXENEIITMGLFKLDENQNEQKXVKITVYELKPEYFEKEIDXKVVYKNLSYFQYDGYPQFYKEKEVSCLNLSMAKLINXKIYLNGDMATFLKLKKIAGKRKIFEIVANKQAKSKQIIEKDXKLYIDXNEGKRESLYLFDEKLXNLENKEKIKQELQQYLDKIYNDLSKEEVSIEEVNNLRXAIASNMVXIVNHLFKKYPGYFVFEDKTIEDNKNRFEKYNITIXTIFERKLLQKFTYNGTVPPNYKLFFTLKDEENLNQIXNFIYIPETNTSNACPVCSIXNFLKKTRNGKIEVDNEKIYKLFGHXYXPEFENSMHHLSNEEYEKLKNEXILKGDDLKKNKYQPXEINXKECDYHMGKNNYXFNYLHSXDDLATYNIARFGFDYLKNILKI

SEQ ID NO: 123 - protein, 1194 aa, unknown
  metagenome-derived sequence
  MISC_FEATURE (1)..(1194): Unk76 Cms1; Xaa=Gly
MESFKNIYEVRKSIRFELKPYNVTREILKGDNDYXNLDSKIKHIKKXEFEENFNWNRFCLNGYSNFLEKSKSFLTFLEEVNLEIKKENWIKXKKDIYFDFKRLKXVFKNIPSLKKIEKFDNNFKDKLYEIEKEYKILFHIFQKLENKEKXEANEKKSEISKYLRKISYLNRNFLTIFKFFDEYKTDKYLFDNYKKLLDETFEKINNSIIASNENEKTGSCFXKFTFNKYSLFRRETENLKDKYYKNKKLLEENVKNIVETKKIKDDREKIIEIKLETILDLKLEKENEKIQERLEKFNFERNLDEVISELDYINXNILNNYIQNFIKDYKENKQTLIFKNESSNKYNKXKIILNNNEYNISALRXQTLEXXEYLTLLKKDYKDLNKDEKEEKRLVDKFLNIILKNKNINKDFDTIKNFRDKLAKYRXKLRQNFSASEREFINEAMIKYYAKILEKDXNYFLALTDKNNILDKNINNIKIDKNIKXNIFSNTFNIYNYSHLHFXALEKLCLMXDXDLIKNDXLIKQWNKYKNQKNNINXRCAIHQRYFDKKCENCKNDKEKKEKEFFSSFQSHIIKSLYKLKENNXEDWTQYITEIEKLETIEEIVKFINSNFYKLEKKEIKTEEIFELAEENEVELFQIYSKDFNIFNEKFLSXEENLRILKSXEXYREDKKEHXEETKLISNTKRKKDKKKNLFTIYFEEVFKNRDTFLXQEXXVFFRNANLESDKKRFRNNKFFVSFDIKFNKXTQNDNIKLCEKKEKILEEHIKNINYITISKLKNIKDENKIFIXLDRXEKEHISYGIYDXKLKFQXKIXHTNYVKKIXKEQEKFQILEQKDYENITLKIGNKIIKIEKPIYKQLTTTHKYFDENXKEEINLLELNXLQEYHILYIFKQXENXEYFVDLENXXKFILNSKKYXFTILDRNXEEIKIIDXNDXKEIIDYYLLFESEKFKRILEINDEIKYSENMFNLKKXYISIIKDFFDKIIFDYKKEXKEVIFIFENQTSNKKDISNKYLXSTILSDIEENIITKFNYLINKESNDKFQLTPKIKKEDILFKNNNIYEMFXNCIFINQDNTSTXCPNCKKIFLNKXKKXKIEEIPXNTLFXHXTGNNEXNMKHLTYEEYDNLYEKDEKFKKNHTNKNXKKIQNKYLALNNCKFYLQNQNFSEFNFIKSXDNLATYNIAKKXLEYINSLN

SEQ ID NO: 124 - protein, 1149 aa, unknown
  metagenome-derived sequence
  MISC_FEATURE (1)..(1149): Unk77 Cms1; Xaa=Gly
MQKYEVKKTVRFKLIPIIKNSENLKVSLEKQINLEKFIKNLENYLNKFKNTFFYDKEKHIFKNKIEIKYKWLQEFTRNNFYEFLNKNNKNKKYKLSEINYLPVIFKDRFQELENIINNLKIIENLPEENQEKRSKIAYFIRQLAKKDNFDFITSFIKYISNSNNPYLDKDLKNLQQLADFLKNDLLLLINSYLPSQSAXLEVVKASFNYYTIDKYSNINFEDKLNEKKAEQRQKIKEIRDNDRSFSKKFYXQSIKLDEKFFNKIXIKENLYEKTLEEAYDFIKNFKANAKSHLISDLGKEEFTTYTKSFNTIKKEERKDYIQDAFDLTYENFQKVHPLFDMTEEDFNELMKLSKEVRELANKKNKILQNYXDIKSKELEEKIQNKKLKNQEITEEENKFLEINELLKIKKEERXKFFNKPXQKVYTKNYYLLNELFKDIAIKRXFLKAEIAGIEEEQNQARLLKYWSLITEKDXEKYLILIPKENRKEVKNKIEELNNDXDIKIYYFKSLTLNALKKLCFKKIGNTFIKPVFQELLFKDDNKPYFKTNKRXKKQLKRYDELNEKELIIFYQDVLKSEAANRQLDLVDFXELNKIFEKDYRNIEEFRIDLEKVCYTKLVKXIDDYNYNKLINENNIIEFKITSQDLKILEEKDEKIFPKHKNKEHTQKWLNFWSKENPENYYPTRLNPEIKILYRDKLLERENXKKETRFNKEQFTLSTTLGLNIPSKRLEFRFDKTNTIKEKVEFFNEKFNKEFKXEWNYXIDRXINELATLSIIKWKDETYTYNXKTIQKPEFARIKVYKLKDENVTXEVEKYDXTKKEVKVIDNISYFTGQENLFESFETXVIDLTQAKLINXKIILNXDKNTYMKLKLLSAKRRIFELFANXKITELKFERXKNILFFLDKDNYYYPIYWFTEEQKQNKSLIDEIEKKLNNYFKYIQKNNLFEDNETIEKINHLRDAITANIVXIINFLQKQFPXKIFLENLDKTLLQREKFSYKKXNDGELTQIEEKMIDXHFQQSNTDISRRLEWXFYRKFQEDXLVPSNLKQTIFLKDDFXINQFGIINYVEVKGTSSICPYCEKITENKXXLKNHINKNTDENHKLKPNLSKIEAKNCIYKELYNKNLQLNYDSIAAYNIAKRXYEYFNSLK

SEQ ID NO: 125 - protein, 1215 aa, unknown
  metagenome-derived sequence
  MISC_FEATURE (1)..(1215): Unk78 Cms1
MNSKEQKQLASTSDYSYNKAIRFRLEPVAGPLPVIEKGHYSLNDLTEKAGVFADKFEQFIYKTSVNGAFIENNRGEKFPDPRVSIKKQWLKLYFKNDFYASGRKKQKEFSLDKFKYIEEPLKEFITEWRNTLSSLRMIAVQPDHSKQRRSEIAECLSALASKFQFQLLRDFCEYANHKDEQKSLNDLKNLSEEVDQILTSLVNDYLPAQTAGLVVAQGSMNYYTVNKKPKNYKQEIEKLEKELESLDAEYTKMKLYKAEQKSRLYELINSNADIDTIKRECPLFADQDDHCLNAVIDLTKKIDELTRIKDENNKLSDKQKKELKDLKIERGYYFIKKTRGKKHSYYFKEYEKYCNKYKNIALERGRILARIKGIRCEQIESQNLKYWTLIFENEGKPYLWAVPKEKMQEFRKEFNHLDKGNAVLYIPHSLTMRALHKLCFAEESSFAEEMRKKDYGLYKMLSAAKKATNDEKSRNFCYGSTKDDLSLAFFKELMKSKFAHEILDLDFFELDELQTAENLNEFEELLEKACYYMEPLYLTKECAEELIEAYDITVFRITSYDLEEHYRNTHQTPESEPKRHTREIWEKFWKFKGKEGSVRLNPEVKIRFREKDENVVRYLESKGFDLKKIHNRYAEDQYILTLTFTLNAGKRYPQLAFAKTEDICREIDNFNQKFNEQHWDNLYKYGIDRGEIELATLCIAKFRSDDTYKDKNGKVHMKPTFPNGENDIKVYKLKKEWYGKKVKSNLETRPFDERKEKRVIANISYFIDRTEDPDWFEKYTCTTIDLTTAKVIKDKIVLNGDVLTYLKMKKEAAKRVLFELVAEGKLNKDCRQLVWEKHFSSTALVFPHINEKCEIAYNAAADVVYFFEDETGKDFEGMLIKDDIAYTKENVLNNLQSYLDTLIEEHSKDSSDINKHVPTVSKLNHLRDALVANMVGVIMFLQKEYPGIIILEDIEKNLMQKHFEDIYNNISRRLEWALIRKLQTLSLIPPHIKDIIEIRERARNKNKEESSFQLGALVFADKKNTSAKCPYCDKKWKWGGKEKEYKFTQHRYICGEKHSCGFDTYSIGKDFEFLKDIDDPDKVAAFNVIRKVLNYKTISKFEGKISEKADKNGFGHKKESSQHKKSGSASISYRKPKVKKEEKRETVKIIETLSKGNAGSVIKALKKLKGMNLIQSDIELLSAVLKKRSDSKQSFNPQVKEYKKLAEELKKQAGF

SEQ ID NO: 126 - protein, 1056 aa, Unknown
  metagenome-derived sequence
  MISC_FEATURE (1)..(1056): Unk79Cms1
MKDYQNFYELRKTIRFILEPKEIKRPYQPIVNNDDLGKRIDNFINKYGHAIQIFRELIYAAPRDSEEKKLSKNISVKHSWLRNYTKNDFFNVKEKIIQYDKDNKKRGNKIAIDNTNIKFLNDYFENWLEENKECIANLKICLNQPEENQKKISEFAYWIRKITKRSNFEFIFELFNGSIDHKNSNEKIDAAKKELDECKPLLALLEKAVLPSQSLGVEIECASLNYYIVNKKPKDYPQEIQNKKNELQQGHSFSRNEQNVLNQVGFIDIKLPITDLKEAMKKFKAEQKKIFYEFVNKGEMYQELKNKVDLKLLNDISENNFNKFEKETDDQKRGKHFQFSFQKYKNFCNIYKNVAVKFGRIKANIKSLEREKVDAEKLQSWAVILEKDNQKYILTISRDAKNNLQNAKKYIDDLQNENGGQWNLYALESLTLRALDKLCFGSDKNTFMPAIKNELLQNDNSFFINGDLKRKDQFSEDGKELIKFYQTVLSLGSTKEMLAIDNFKNFDELAIKEYGELADFERLFKKICYYKKSIAISEDTKKKIVDDYQGNLYKITSYDLEKDDAEILASLQNKNHLGRSHPEFHTKIWLDFWTDGNEEKNYEVRLNPEFKINFVEKHPDELKDRDLGKLKKNRRLNEQFMLSTTITLNAHGKNTNLSYKTTDDIKKYIEKYNDEFNKKIKPFDIYYYGLDRGKDELLTLGLFKFSENEKIKFIKQDGTPGEYNKPEFIDLEIYQLKKEKYLAKDSRNRVAYKSIDLFLDNIGIIERISVESCIDLSCAKIVKGKIILNGDIATYLELKRVSALRKILEGAAKNKFRSDKICYNADKGSLFLNIENRGKLENDDLYFCDDRFDNILSLDAIQKELQDYYDGIKNNSGNAEMIPIEKINHLKNALCANAVGVINYLQQKYFGIVAFENLDMANKNQRISEFSGYLGSMIELKLLQKFQTLSLVPPGLKQVMSLQNFKEINQIGAVFYIETCGTSNKCPRCGTENSDKSQKWNAHAYKCKNNNCNFGTTEDKTRNDLIALDNSDKVASYNIAKKSLAELHSKCSLKNE

SEQ ID NO: 127 - protein, 1144 aa, Unknown
  metagenome-derived sequence
  MISC_FEATURE (1)..(1144): Unk80
MDKYQLTRTIRFKLKRFNGALQTEVDIAKKSTSDQELEKLLEELSMNMNSYNQRWSDFLYKLHEGKKNRRILNRIQVTPKWLELYARPFLYHKTSRPKHGKPLLTDYHGLPDYIENRLEEWQHLRETLDKLRTRPEHHQARRSEYALLIEKINIPQNFPFFYALADYAQDKDNEKYKNELIVIGERIYSLLSSLRKAYAPAQHTGIEIARASLNYFTINKKPKEYDDEIEQWLEEQNQEYTLADIKSKLSLNPIIIKPDIRDSLPDKATLGEWYSHLKTFKAEQRSALDNCMITSKSIEEWPILFKKINTNKAKELISLTSKITSNANKINNLYQILNDKKKSKRAKDVADKELKTIRNNQIQIKRKRGSIISKAPDFKNFVDAYATIAKENGKIKAKIRGLKKERQDSQLLNYWALLLENCKRHELLLIPRKNRKKVYKILEKLPKTNDKGEASVIYFKSLTLRALHKQIFSEDSTLKQNVVQQLKHDFPEMEGAYSMKDWEESKVVSLYQKVLKYCNDGTLSIDVGDFNIEELVSSSYSTIDKFRIALEKQCYIKRCLIDKSLYQELREREEFHLLSIESKDLNSSKPIQAMNEHTQLWKQFWSADNSKEFFPIRLNPEIKIRFREPKDTRIAKYRKKSGKYEKESGNYNPKKKNRYLHDQLTLEVTISENATGLRQELAFTKPHGLKEALDEYNQSFNKSYYPRNKLDDICFFGIDRGHTELATLLIIKKPNDNQASFQKFTTYRLIDLSHSRNYTTPERVEKTKYAKNNISDFIPDIENEDIFEKRETASLDLTTAKLIKGYIIENGDVNSYLNLKMLSAKRRIWEKHSISKIPEDISISLDQETGYFRFDTEIEEFKNPRKLYYFREELSDYLSEEDIKKELNSYLNKLRTKNQERDLLTLEKINHLRDAISSNITGILAYLLRKKEFIPGILVLEDLNTRLLESHFKDKSNEILGRRLEWKIYNKLSKMNLAPPQIKESTLLREDKKYKVKQFGSVLFVDETGTSNECPNCNKKPTDNFKEKSEKDEQKRLFELNKFQYKKYHCYHCGYDTKTNQMEFTDINNPDDLACFNIAKRGYEYILNPPKPKKTILKKTYSPKGKKQQGRKQAKNPPRTRKKPNKAATHNPFANLKDMMKKDN

SEQ ID NO: 128 - protein, 1189 aa, Unknown
  metagenome-derived sequence
  MISC_FEATURE (1)..(1189): Unk81
MNKYQKTSAIRLALKVNENFESNLKNAIETYKKNTADPEELCSRLIEILKKVIELFDKEEVKKDEYKSLLYKLKLSPHIIGSEFGLFISGSGRADSLRLNSRKLKGFFSTLFKKTNESLISLEKQLTEKNTPNFSPKNTRKILDEIFKSSLDIEHELLKRKAPTLKEAIDLIQKQNYHSDDLVPQEFAELQKTLAKLSKILDKLKESLSIFHEVITASLNEHTLTRQTTLEEREKKIKEEEDKLTQKVWAGDLKDNLNYISRFVAGHKNAFKATMNYLGKSINDNFITVEEAGKWTKKFYKIIAEGYKTEIKGLKKEVDELAKQIIGSDLEEFVKSNKDKIRVNKIKIDQNIKNSAINIFKKYLPDLPSNIKDDFLIKFLRNRILKVLIDNLIGKENKKYQIKPERKNAANELAKIINNKSEDNLEESQIIEILLNKKQKAAHTAGTNYTHIINKSNFIQNKNKVAKYIGNIKAKIATYKKDKKNLSHLALLVLDKKDENFDLLLVPKKFKKEFLYTLERLNEPVGDKKIYKIESLTLRSAKTLISANLGELIPFFKAGKWHTIFAFKAFLIKYLLDAGSINSTKAAALKCKVVEEFKKLIEYASLGGQEQKEADKFIGVVDKLICNSKNRFSHIELSHSFAEKSISIVEKDYSDVADFKKDFTELYNFVLVANVNSGKLIKLIQEAQKKFNNPNNLQFSNLFLLTSSGVKGNYRQNRRYLKEEKELLQSIKKQDFESIRLNPEIKIFLELGLDTQSSEELKELASKTRRGKDRLSIVFTITKNAKEEEDFLPAFAQDEDLETRIFELNKVVNENLKNAVRIGLDRGESELVSAVFGKIEEGRVKFQKIQVYYIDYKKIFDENQEGAVKIFLNPSLLFDENKPYTKYTKHLIEKEISQENLSYAKVIKDKVIMNADISSVVNQLMYITFADLNIEQVENLIVAEPGFVDKTKTIQLKFNGINSKKFGINASYLYLNGNITEDVKENFISAFLIKVLEHKLKIFNERVLPLIKIGQISIDTLPKNTKEALASNIAGVIAYLIEKEFNNQAIIHLEDLSAQFKDDHSKNGRAISREFEWALYRRLGKIENDFDLVPPKLGQTIYFAEIKKLKQAGIIKYLPTGKSSSFCPECLQFNFTNKDGIKKYIKITQKCQFCDFEIGNNELGIDSPDTLAAYNLIYPEFERRAINNN

SEQ ID NO: 129 - protein, 1173 aa, Unknown
  metagenome-derived sequence
  MISC_FEATURE (1)..(1173): Unk82; Xaa=Gly
MEKMQNLFEVRKSLRFELKPYKITREILKXEDNYXSLSSKIKHIKEDEFEKEFDWNLFCKNNYSDFIIQSKKLSSFLEEINIEIKKEKYGKTKKSVFFDFKRLKXIFKNIPSLKKLTYFSKDFKNKLEEIEENYKIIFDFFEKLEDKETKNEKKSEISKNLRKISYLNRNFLTIFKFFHKYESDDFLVENLEKIKNEIXENFEQINNSIIASNENEKTXTCFXKYTFNKYSLFRRETEKLKDRYEENRKLLNENIKKIVETTEEDKKIKNDNXRNENIKLETIRNLELEKENEEVQNLLKNFNFDRNLDEVISELDNINXVILNNYIQEFIKDYKLNKQNLSFLNKSYSKYNKXEITLNSKKIFIKVILQTLEGGEYLHLLKKEYKNLSKSEKYEKKLVDTFLKIIFKNKEINKDFNTIKTFRDKLAKYRXKIRQDFRASEREFINEAMIKYYAKILEKDXNYFLALTEKEKLNXNINNIEIEKHIKXSISSNTFKVYNYSHLHFXALEKLSLMXDXDLIINKELAIEWNKYKNQKDKKINIDFKKFQSHIIKSLEKLRDDEKYNXENWTNFISKIEELKTIEEIVNFINSNFYKLEKKEILTEKLFELAKNKEIELFQIYNKDFNIFNDDFLSXEDEFLKDLEKXXEHXEETKTIKNTNREKKKKKNLFTIYFEEIFKNTDTFLXQEXXIFFRKXDKEFEEKRFRKNKFLVTFDIKFNKXKQNHNTKLCEKKDKILENHIEEINKYTLEKIKKIDSEDLIVVXIDRXEKEHISYXVYDXNLNFKXIIXNTNFIKKIXKEQEDFEILQQXDYENITLKIGDKIIKTEESIYKQLQTTYKYFEKXEKAEKVEEXYILEEXERLLELKXAEEYHIEKVFKQXNNXKYFADLENXXKFILNTDSYXFTILDKDXNKINIVDKNNXKEIIDYYLLFEAEKFKRILEINDQIKYSENMFNLKKXYISIIKDFFNKLIFNYKKEXKEVIFIFENQTSKKHSIXKNENEITNKNLGASILSDIELNIITKYNYLTNKEDNYKLQLTPKIKKEDILTXKKXDNEEFNFXNIFFINPSNTSSSCPNSKCLKTLFGHXTXNNEXDMKHLTDEKYDNLYDSDEKFKKNHTNDKXSKKENKYLAXDNCTFHLQNPDFSKFNFIKSXDDLATYNIVKKXMKYINSL

SEQ ID NO: 130 - protein, 1025 aa, Unknown
  metagenome-derived sequence
  MISC_FEATURE (1)..(1025): Unk83; Xaa=Gly
MEKFKNIFEVRKALRFELKASKITRENLEKENIYKNPVNILYKNKLEKXLNYSRTVFENDLKYFLDNSKNIILNLEKIKNLLDNTRFSEIFVEKKIFELIDKDFYIKFAKNKLSXXRSSSLQEIKKNLDWKXINLIKNYYLEIFENIENLIISIENLSEKESSFSKNEIKKFLRKISLEFIRIYNFLEKFDIKNKDFNKNLKEYIKKVINFKTFFEEIKSYYFISENQSSXILVRRFXFNEKSLKRRQPKEIKEELEENLKSFNEKLEIKEKLEEERQKLIQDFDLKLKTEKFEELLHPEKWSEIRKKKEKTKEEQEKLDDIDNQFKELKKLRNKDEEISKKTQELNRYKKDLXNLKVKINNLEKELENNLALTHYAKLLTNEINXEKLYYLVLIPIENKFILDEYISDEXNLEILEYNTLTFSALKKLALSYDXTMGIYWDKKEEINKKSNLKRWIVDLYIDLENXERQEEFYKIKRYVINLIKTYKNIFGNIYFDFKRLYDTKSLDEFKIEFDKQXYNLKWKNIDLEIIKKLEKEXKLEFYQIYNKDFYKNPDFFDIPYSIKEQKEERQRRRKSQNVKXNNNLFTIYWENFINDIANXNEEVRLNSDCXYFVKLKKEDKENHRYDRNKIIXNFGLIFNPGKKLTKKYDEKENIKKFNEIYKKEIKKVKNKSFIXIDRXEKELLTFCLIDENXNCIKNKNXEYIIXDFNLINNKXDFIPKDKCKYIDISXKEYKDLLGNFLPDFTHPENIISXKKSFQFDDEKNLYYFKLNHNARLYLLEXENKRYKIVNKEXKEIFLKDENXNNVIDYYLLFQSEVYKRHILKKTXNIKLEDVQELRXXYISNIIKQLNNWIVKYNXIIILENLDKTQIDEKXNIYKTNKEKVLEKTLXATIYQEIETLLNRKYNYFIFKDQDIXXLQLTPKVNNISDIKNLEKSKKNVNLXNIVFIDEYLTSKECPICKNQLFRDKKKXDNVYHNEKYPXNNXCSFDTRTNTYXFDFIKSXDDLAAYNIAKKGKEYIENLSN

SEQ ID NO: 131 - protein, 1119 aa, Unknown
  metagenome-derived sequence
  MISC_FEATURE (1)..(1119): Unk84; Xaa=Gly
MLESFKDLYEVRKNASFRLEPQENAATNENLYNQDVDLSEILSKYKNFVYDLKNLLYIEGEKVTEKEKDNDLSVDKLDSSNVVHINHKYLSKYFSKEFFENYDRIIKRNKHXAKTKNWTTIGNNDFLEVFFRSFFNNAFENINKLQELIDTKENEQKRKADIAFEIRRLLSRNHLXKIFPLFKGGYLTHKNDIKTIPELTNQAKELKELLDNAKIYFLEDSNFXVQVEHISLNYYTRNKTQKEYDELIKGKKKLLDSPYNKDISELYXIDRNLPIKQLYEEMKMFKARQKSAFFQQLQSKTPFKKFKEPFTFTDNEXIKHKEFRTELFFDVEEEYYNKMLDLTKKIEKSGSNKFKKERXDFLLFQDKXTKSFKXWSXFCSEYKKVAMEYXKRKAESLSLEREKILAEQERXWXVFSKVNNEFYINTFPIDKVKDAYQSLSKKKNDXELSYFILSSITLRALNKLCFSKDSKFINKEILIKLDNEFLKEKEYNNKTKEIVLRKKSDLTELKLIKLYYNVLELQNSLRISYKNSDSFDKLKSSKNLEEFELNLKNETYKLEEFKTTEDEFNKILKSNEXKSYKIINKEKXNFEKWWKNFWNSSKDXEIRINPELNISLRKXNEDYNDKISFHRKKDDVYLLNVNFSHFANRSYIDSSFIEDDKRKENLKKFNDLYNKNIKLNYFYXLDKXTNELITLGLFKKEXGKIKSVNISKEIPVYRITRKXLLHSKVTFKKAPKEXQNPKTIHTLYKNPSLFIDELDNEEIFEKVNIESCLXNLNSAKLIKXNIILNXDILTNLNLHKLSAKRKLYIAITEXKTIIKNIXFDEKEQENXAFFYEYINKGKTEKEPVFYINEEFLTIVSLDELKNELNEYIKYIKNEPNEYKKYMXNNALDTDISMLAINKIKNALCANIIGIIMKLQEKFPGYVCFESLSNDNNNRDMEKEHSFLXNLINDKLYSKLNINASVPPILKKFRSELKNSYYQYGQVIYVNEDSTSSACPVCNDKFIKXINKKXNLEEYKKNKLYGHLTESESSMHHLTDDEYNKKYDNNDKFREKHTNDKGKKKDNIYRSXNXCNYHMKDNPKXFDFIKSXDDLATYNIAKKALEYLEYLESQNNDETK

SEQ ID NO: 132 - protein, 1039 aa, Unknown
  metagenome-derived sequence
  MISC_FEATURE (1)..(1039): Unk85
MNQIQIRKLDYQLTKNIGFLLKDVILEKWLVQKSENLKSSRLSINKLEFLKKLNNLLEDLFSSKDVGLIDRFLFYKHERGFNLFNYELDKKFLCKYDLYSGKTRYSHLAFNKMSFKKIKGFWLYFSRRIEEEILNPLNNYLNLYEKGINPKESEIRSVLRKFQGRYYFELLKEFFDGLRFNYKEKNINKIDFEAKIKDIKNKINSINELIQKNPFENKDELTKFSFNYYTLNKRPLNYRGDIDDTQSIENYYKSLKESYEKSLNEKINQFEFIKRYNNIINFVNKNLGENLLSYSLENAVEKLKEFRATIKSNFYKDINRADKDKLDLNYFDRAHPLFKFKDKNSFNKFLNSKVDDIKKYFNYEFKGYKNLCNLYQKLAVERGKIKAQIKGLEKEKEEFINLKYWGFIADYNNEKYLILLKKEFRKDFKDYLDSYKEEKPDFTLYNFKSFTFRALEKLIFNSYNNDFFEGIKQDERISDLLKKSNIRDKYKIKESLNNKDLILFYKYILTSEYAKNNLDLEDFNLEEVLSKDFDNIEDFRIALDGACYFIKEINLSWNKFINAWKNNVSIFKIYSYDLIGKQKELKFHTKVWKAFWSSFKDSRIRLNPEGSIFLNVVDEDERRTILLKKEKLEREGKKFIRNRKLEDYYYKALFNFNLYFPSKEIKISFKEKDKIDKSIEEYNNNFNQQNDFKNLFYIGIDLGEIELATLGIIKFKDSSSNFELQKIKAYKIKDEFINPQNIKNPSLLDDNFFEEVELDSLDLSKAKLIRDKIVINGDISTYLKLRIVSAKRKLFDLVKKQGEALANEKICFYNETKNNLGVNLGNDVFVLKKNNKKEKYLRVYKYDPEFENICPKEYLNEELNNYYRSLLKDESINYYEEINSLRKAISSNIVGIASYLQDIFPSILVLENLSKETREYHMRKENFFLDSQVDWMIYRKLETKKLCPPNINNFKFLKDLESENGVFQLGGLVFVSEKSTSKKCPRCGAEELGLSEEKFKEAKFELRNMKCEQCSEEFHPDLIACINIAKSAFDFLNSK

SEQ ID NO: 133 - protein, 1157 aa, Unknown
  metagenome-derived sequence
  MISC_FEATURE (1)..(1157): Unk86; Xaa=Gly
MLKTFKNFYEVRKTASFKLIPNKIYRQIEMSKEPSNFKDLGKQYVNIINSLSELLYEDEHEDNTEEVXLSTNLXSLISQDDQLKIGEITKSANKSVENHEQIILHXDEKDFDKKDFNKLVRIKHQWIKENFRSDWHKNKENIVSYKTNKDXNRVKTKNWTIIXNVEFLQVFFKDFLKTALEYXNNIIELTESQEHDKSRNSDIKFLLQKIQSKLHLNKIYQLFEXEYINHKNDNSDIEYLREQLRDFKQKANNCIENYKISDSFXMFIEHGSLNYYTRRKTQKDYEEEIIKKSEXLKNKFYGNLXALYXIDKNQPIENLYKEMKIFKASQKSAFLQRLQSGINFTNFQKEFKFIDNRXDVVENFKIVLFSDITEDRYEEMLNLTNQIEKEKNKESRKQLKEKRGKYFQHHLNKYKKFCNDYKDVAMEFXKRKAEIISLQREKVLAERERXYXFFAKDXENNFYINTFDIENSQQAYHELINNKNTKXEIAYYILSSITLRALEKLCFSERSTFSKXNIINKLDEKFIKIQNGSXRKIFKSKKELEEENILIDFFVEVLKHQTNLNLKFKSTQSINILKECKDIGAFEILLKQETYILDEYFISKQNFESILEKYKXISYKITSKDIENNTNKSTFSSWWRDFWEEENKENDYVLRINPEFSISFRLXDKEKYKNTLPFHRKKNNQYFLTMSFSHSADRNYINTAFINEEDRKQSLQDFNDIFNRKNRFDYIYGIDKGTKELVTLXIFKKSNKXLESVNISEKIPVYKITKDXFLHTKTTTKKQPKKXEQPITIHTLAKNPSLFLDEIDNPKIFEKLSITSCLXDLTYAKLIKXKIILNADISTTLNLYKTTAKRSLHNAVTTXKMISKQVLYDNEENVFYYEYENRGILNKEKNLYWKDEFNFLPHKDEFNSLKEEIEFELNEYIKDINSEEDISMQKINNYKNAVSANIVXIITELQKYFEGYICYETLNEQTVKKEFDTFIGNVINEKIYNKLQLNLEVPPILKKFRTEVXNKDIIQHXKILYVNEKNTSSACPVCNEQLLKKDKNXNLSDKNDNEIFKLXXHLSDFENNMKHLTDLEYQERLKNKSFEKANTKKXKIEKNKYNSXILNXKSCDYHMKKNNYGFDFIESXDDLATYNIAKKAKEYLESLPTPPQP

SEQ ID NO: 134 - protein, 1129 aa, Unknown; identical to SEQ ID NO: 117
  metagenome-derived sequence
  MISC_FEATURE (1)..(1129): Unk87; Xaa=Gly

SEQ ID NO: 135 - protein, 1294 aa, Unknown
  metagenome-derived sequence
  MISC_FEATURE (1)..(1294): Unk88
MEAIKNNYQLSKTLRFGLTQKSKTRKDGFTGEIYQSHNELKDLVKSSEDRIKKSVSTDEKSEMSLSVDKIRCCLVMISDFLSSWQQVYSRADQIALDKDYYKILCKKIGFDGFWVDERYDRKNDKTVRTKKPQSRTINLSELDKKDDKGIERRQYLLTYWRDNLINAADKFEVVTEKLKQFEDALNINRTYNKPNEVELRKLFLSLTNIVQETLQPLCLGQICFPKLEKIDDSRTENKHLIDFATDYQSKSDLLSEISELKKYFEENGGNVPYCRATLNQKTAVKNPNSTDNSIDSEIKKLGLDKILKENKDALYFANKIYSLSAKEKLSKLDDKTTGLIERSLLFKYKPVPAIVQYEIAKTLSETINKSEEDLLEFLRSIGQTKSPTKDYADLQDKNDFDLDAYPLKVAFDFAWENLARSIYHSDADIPVAVCEGFLKKNFGIDKSNADFKLYAQLQELKAVLATLEYGNPTNRQTFINEATKLLSPISWDKIGRNGNQNKYSIEKWLKTLTKDDKDYKDAKQQIALFRGRLKNNIKTFDDITKYFKSVAMEMGRTFAQMRDKITGAAELNKVTHYAIIIEDQNFDKYVLLQEFVDKKENRIYAKTDRHHSDFTTYSVNSVTSGSIAKMLRKKRMDELNRNNRNSFEQKPELSEEQKEQRNIREWKEFIEDKRWDLEFQLNLSNKTFEQIKKEVDAKCYELDINYISQETLSDLVNKKGCLLLPIVSQDIAKENKTEGNQFTKDWNAIFTQETPWRLTPEFRVSYRKPTPNYPVSDKGDKRYSRFQMIAHFLCDYLPKSDSYISNWEQIANYKDDKLQEKAVKEFNADLRGRTEEEKQSESVNALLAHFGNQNKKQKPVERPKEKFYVFGIDRGQKELATLCVIDQDKKIVGDFDIYTRSFNSEAKQWEHKLLEKRVILDLSNLRVETTIVIDGKPEKKKVLVDLSEVKVKDKDGKYSKPNKMQVKMQQLAYIRKLQFQMQTNPDAVLEWYANNKTKEQIMSNFVDNENGDKGLVSFYGTAVEELNETLPIDKIEEILKKFQELKDKEKQGETVKLEIDKLVQLEPVDNLKNGVVANMVGVIAYLLQNLDYQVYISLEDLSKPFSGQIIGGIAGVPTKTNKEEGRRADVEKYAGLGLYNFFEMQLLKKLFRIQQDSQNILHLVPPFRAMKNYDHVAVGKGKVKNQFGIVFFVDADATSKTCPCCGSSNNKPNLKMYPNAKKGLSKEGKEVWVERDKSEGNDIIRCFVCGFDTTKDYSENPLRYIKSGDDNAAYLISAEGIKAYELATTLVNNK

SEQ ID NO: 136 - protein, 1288 aa, Unknown
  metagenome-derived sequence
  MISC_FEATURE (1)..(1288): Unk89
MIMENIKNNYQLSKTLRFGLTQKQNGNSSNTDNVYHSHSALKELVDISENRIKKNVSTEGATEMQLSIESIRKCMIMIEQFIKDWKRVYYRSDQISLDKDFYKKLSKKIGFEAFWFERNKKTQQRIKKPQSCIIALSELSKRDNFGKERQEYIVEYWENNLLKSTERYEEVSEKLEQFELALKINRTDNRPNEVELRKMFLSLVNMVREVVEPLCLGQISFPKLEKLADNSKNKQLRKFATDYQSKSDLLTQISELKKYFEENGGNVPYCRATLNPLTAVKNPKSTDSSILDEIKKLKLDVILRDYQSVALFDNSIRDLTASQKMQLLNQNNEGLIKRGLLFKYKPIPAIVQYEIAKVLSAELNKDEQELRNFLRDIGQVKSPAKDYAELQDKKDFDINHYPLKVAFDFAWESLAKSVYHPDIDFPEEQCKTLLREVFQVDENNENFKFYAQLLELRSLLATLEHGKPTEVITIENEVKKILENIDWSKFGDRGKNYKSAIENWIHNRNKKDFKGDYFKKAKQQIGLTRGRQKNLIKKYDEITKSYKDIAMKMGKTFAEMRDKITGAAELNKVSHYAMIVEDTNQDKYVLLQEFVENNKDRIYAKSTPQNEDFKAYSVNSVTSSAIAKMIRKIRIDKLQANERNNNRQQAPELSETQKEARNIKEWKDFIAEKRWNYEFDLKLDNKNFEQIKKEIDSKCFKLETKYMSEEVLVDLVKNQNCLLLPIINQDLAKKIKSESNQFTKDWNAIFAQNTPWRLTPEFRVSYRKPTPNYPKSERGDKRYSRFQMIGHFLCDFIPKTADYISNREMIANFKDDEKQKQTIINFHERLNPKSENEKMNMLLAKFGNKNSNQSKETKKEEKFYVFGIDRGQKELATLCVIDQDKKIIGDFNIYTRSFNTQNKQWEHQLLDKRHILDLSNLRVETTIVIDGKPDVRKVLVDLSEVKVKDKNGNYTKTDKMQVKMQQLAYIRKLQFQMQTNPDTVLEWYNKNQTKEAILNNFVDKPNGEKGLVSFYGSAVEELKDTLPIERIEKMLQQFKSLKNEEKEGKDVKAEIDKLIQLEPVDNLKAGVVANMVGVIAHLLKEFNYQVYISLEDLSNPFGSHVIDGTTGTHSKTNKGEGKRADVEKYAGLGLYNFFEMQLLKKLFRIQQDSQNILHLVPAFRAVKNYENIIAGKDKIKNQFGIVFFVDANSTSKMCPVCNSTNETNREYPNAKKGTSKDDKEVWVERDKSNGDDIIRCFVCGFDTTKKYEENPLKFIKSGDDNAAYIISAFGIKAYELAKSVIDNK

SEQ ID NO: 137 - protein, 1299 aa, Unknown
  metagenome-derived sequence
  MISC_FEATURE (1)..(1299): Unk90; Xaa=Gly
MIMVNLESFKNLYEVRKTVRFXLNQPNKKSNINKTHXQLKDLVDLSFEREKKLINNEKNQVLIDSEKALIEKLQQYVNXLEVQLENWEXTYQRYDLIAINKDYYKILARKAKFDAMWEISKFDKKSNKYIKVKQPQASQISLSSLKIXNRSDSIIQYWXEIIEKTDYLLNIFKPKLEQYERAINDANSTHIKPDSIDFRKIFLQLLKLTKEFLQPLLDRSIIFEFSKKKVSQQIEKISEFAXEKNNTKIYNVLKNXEELRQYFEANXSQVPYXRVSLNYYTAVQKPNNFDQEIKKAIDDLXIINFLKKSDSQIIDYLHQGSKQKIKLLLTSKSPYSIELLQLFKVKPIPFSVKYNLAKFIEKNYKNEINLSYEEILDKLNLLXRAIDIANDFKNSNNQNNFSLDEYPVKLAFDYAWENTARSLKRTIPFPKEVCKQFLKDNFDVDVNVDNADFKLYANLLFIADNLATIEYNNPNNEAELINEIKQVFDSIDFSFDKERYXXYKNDVLVLLNKAKPQRDYSTILKAKQELXLLRXXLKNKIKKYRDLTQRLIDKKDSHFXIASFVGKTLAKIRDRLKEENELNKISHYGVILEDKNQDKYLLISQLDGKDTREKISQKFGNGDIKVYQVNSFTSKALNKFIKNPLSEDAKKFHXDFRYKHKEVSIYDEKGKWTXYQESFLSHIKKCLIDSEISREQNWEAFGWNFAGCNTYEEIEKEVDSKXYQLTENFISIGNLESLEKDEGCLLFPIINQDISSQKQENKNIFTLDLEKVFEXKECRIHPEFSIFYRKPMEEHKKENKSXIINRFGRLQLLANLGIEFIPRNSSFKTKKEQNRIAIDQKKQNQLVQEFNQEKVNTYFEGLDNYYIFGIDRXIKQLATLCITNKNXVIQDFDIYTKHFNSESKKWEYKFHRKDXILDLTNLKIESDKSXNKYIVDISLFQAKDEDXNPTGTNKQNIQLKKLAYIRKLQYQMSANEEXVLSFLEKYKNKEEREQNMKELITPYKEXKNFVDLPMDIFQEMFENYYRLKTDQNLSESEKKNLMKITTELDASESLKKXVVANMIGVIYYLMKKYEYKVKISLEDLSNAWFFSKDGLSXDVVLNTKNDGTMDLKKQDNLALAXVXTYHFFEMQLLKKLFKISTEEXILHLVPSFGSVKNYTEIFKDKGKYVYKQFGIVYFVDPRNTSKKCPVCLNTQTTXKKEXIPIINRNYKKSNIFYCERCXFQSIHSHCQEENIKDSNGFHYSVEEVERIEMKNKEAIEKYKKQXKNLHFIKNXDDNGAYNIXEKIRELPKKSDVKNT

SEQ ID NO: 138 - protein, 1046 aa, Unknown
  metagenome-derived sequence
  MISC_FEATURE (1)..(1046): Unk91
MTNNNLQYLRKYELRKTIRFLLKPVDHTPTDTNQDFIEMLRSFVTSYEEIVNNVRQLLFYKKDGQNTELSRYIKIKHGWMKVYTKSEFFAGKQQIIKIYKGRKQSNKITINEHSVSFLKEYFERWLEENKECITLLNTFLNAPEESQKRRSEAIFWLVKINKRSNFEFIAELFNGNIEHKSDNSDIAIIKTKLGDCKTLLLQLINIFSPSQSLGIELERASLNYYTVNKKPKDYPKEIRDKQKRLDETYTFQNNEMAFLQKVGFMQISLPIGELKEQMKRFKALQKSAFYEFASQNKNYQNLKRNQDLLLFNDISEENFKKFKNERSAQGKRKHFQYSFSNYKRFCELHKKIAVEFGKINAEIKALEKEKIDAEKLKSWAVLIGHRNQKYLMLIPRNSLGNLAKAKKYIDSLQNDSSGEWKIFAIESLTLRALDKLCFGFDKNTFMGTQSLVYKELQQKYQQFFDKDKLKRKDQFSENGKELIEFYQAVLSLDATKSALAIQKFDGLAEILQKNYENKEEFEKDLKQVCFYKKIVTISEKMKDDLIADFQGYFYKITSYDLEKDDIEVLENFKNKRLFDRNNPEIHTKIWLDFWSSDNASSKYPIRINPELKISFVEKRLDDLEERDLGKLGKNRRKEEQFLLSTSVTLNAHDEYVDLGFKLDDEIKKFFEDFSKQFNQGKKPFEQYYYGLDRGQKELLTLGLFKFSEIEKVRYKKHDGGQDEYHKPEFVNLEIYRIKENELTFQNVEGRYVYKSPDQFMDNSNVIEKINISSCLDLSCAKLIKGRIVLNGDISTYLALKITSAKRKIYEGVTHKKFTSEHVCFEDNKQAFFLNYENRGEIKNEYLYFYDDRFNSIISQDQIKQELQNYHDLVKQNKGYDFISIEKINHLRDAICANAVGILYHLYQRYPGLLVFEDLKKAEKEHHISQFSGNLASRIEWKILQKFQSLGLVPPSLKKVMNMNIGQLGCVVYVPTSGTSNKCPHCGVSNTDKKEKWESHAYVCSNENCGFDSKESSKRQGLNALSDSDKVATYNIAKRGLDKMINF

SEQ ID NO: 139 - protein, 1035 aa, Unknown
  metagenome-derived sequence
  MISC_FEATURE (1)..(1035): Unk92
MAYQYEFTRTIRFNLKSKDIAQFKKFFPEEETDFQGLFDSFQIKFADLLAQFKKAVFYPKNGDSLMVKNSLEIKKIWLRQYAREEFYNINERQRTHNKFLASLFQKNLVDWFEKNKKLFERLKTINQLPQDCQLKRSELLALLKEINSADNFLFIKNFVQPGVANDKKSDSDLENLKDKVGRFEELLNKALFVMAPDLSQGVEVSRASLSYYTVNKISKRDFDQELKNKEADLNEPYNKKLNQQFLQRVGFFDYLKDEYQCDIQNISIQSLYQALKNFKAQKKSEFMQAVQERKQAKELIKDFPLFIPKEAKDMQKFIDISRQIDNKNYQKQRSHNEYEKKQLAKEIKDLKIKRGQYFRESWGFSNYINFCNNIFKPVAIDIGKLKAQIRSIEQEKIEARLLRYWAHIFKKGNKYFLLLVPKENMQQVKNFLDNISSKQNGEYALYSFNSLTLRALKKLIRRNLGKEQARLRDEAVALCQEVLRGKYSELRNIDFSGFEEDIKEISQKHYDSEESFRLDLERVAYCCFEKKLNEENVKQLCSNFNALLLEISAYDFERNIVGKMKEHSEIWKKFWTAENKNQNFPVRLNPEIRIFYHPQRQQDDPKKQKNRFANEHLGVAFTITQNAAQKNLDLAFVKEKEISKAIKKFNEEVVDEFVQERGDNLYYYGIDRGNQELATLCVVKFSKEQGEVKLVNGEVRKFNIPVSAPIKLYRIKEDCLNSKKEIIIDRRGNKKIVTMFENPSYFIDEEEKFDEIESACIDLTTAKLIKNKIVLNGDVNTYLELKKANGKRQLYEKLSEIDDNAKIEFYKDEKERRLQIKSKPTEKNSYQYIIYYSPENEKIMSHEKMQRYLQDYLDYLRADNLAKEYISIEKINHLRDAITANMVGIIAFLFKQYPGIINLENLVETHSKKNNENIERRLEWSLYKKFQKFGLVPPQLRQTVLLRKGKEEDNQCNQLGIIHFVPEKDTSARCPFCGNTMSMSVRKEDKFKYHNFVCDKCGFDTQKPGAPFNFIKNSDDIAAYNIATKQLKDNG

SEQ ID NO: 140 - protein, 1098 aa, Unknown
  metagenome-derived sequence
  MISC_FEATURE (1)..(1098): Unk93
MENKYQITKTIRFKLDPQGNVDAVLLKFQEDLSDKLLRAKTIDNPEGVNSLKPLINKLEGLKKNIQNLIYAKEKNGGYKTNENGRIVWFCGIKIKYTWMRSYMKNAFYDNKQDNPPKAYSLNELDYVQTEFDNGWFPELDEIIYNLRYFDKTETNPKYEKQRYAQIALVINQLSKRSNFEFMKSFVFAFTATNKPDIDNDIDAIKRQIEEIEIELNNQKAFYLPYQSNGIQLAAGSFNYYTINKSPKMLGEEKSKLEKELNQSIYESKGVFDGVERFRIRYSLDEGILSTLNIKNELPVKSLNEAYDFLKKWKAEQKKSFMEAIQVSDDNKAKSIMLFKSSDTDYNTVKQRILKVQDLGKKINNSGLPIEEIEKAKVELKTLKSKKNDFFNTFSNNPQTPNYKQLCTFYKNVAIKRGELKTKIASIEKEKHIAEQVQYWCVVLDKNEHQYLYMIPRDGTDNIKKAKEYIERLKSTSIESPIKLHYFNSLTLSALRKLCFKENNNTFTNTIKNVTFPPYEQFQTEPDKIKFYQKILKNATTLNLDIYTGLDALCQRQFETLNDFEIELNKICYAKTICISQDVEVKLKDTFNAICFEITSQDIKRYLNDDIDNASDIHKNKRHTNTWRSFWYPQNERNQYPTRLNPEIRIVWREAKPSRIEKYGKETPLYDEKKKNRYLHPQYTLITTITENAHSNKINYAFADTKDKGEAILNYNEQINKGVINYAYGIDVGADDLALLTHINNNNKPVLFDAYEITNTKFEKTGYLKGGIQRDKAYKLIENPSYFLKKELYDNTFNDKQFEETFAQLFKKVSISSLDLTTAKVICGKLILNGDYATHQKLKILHAKRKISQRLKINPSLKLIQGSDDLYKLFIGEEIKGNIIYRSKEIYDVIIPFEDVKQDFFDFFDKQKSDDARLEDNINKTRASLVGNMVGVIDFLYNKHPGFIVLEDLKQSIIESHRNQFEGDITRPLEWALYRKFQSKGLVPPISELLKLRELEKFTIQNEKRPKKDTIKQFGIIKFESESETSLLCPKCGKKAYKSSEDEKYNRDKQQGIFECGCVDCDFNNKTNAGEYTSLDTNDKIAAFNIAKRGFENFK

SEQ ID NO: 141 - protein, 1174 aa, Unknown
  metagenome-derived sequence
  MISC_FEATURE (1)..(1174): Unk94
MQNYKITKTIRFKLEANPEQTEALLNQVEKSNQAFDLVFFTSKLKNFADGMRDYLMFQKGKEPEKWQFRKNFTIKKDWLKVYAKEELANIKQKQKEEQDKKSRRQPIQLNEGAKEIIQKSLGEVYAIYQELIQDVSKELNERARRERTGLLLKRLQEKNNLPLLCDLTEHISSGNETDNSIYELLKEKEMLQKELLQGIAEFLPAQSSGLPIAKATFNYYTINKKPTDYAQKIEEQLKELSISDYSKKIQINSKLFLGNDNFKKVMEDIRNRLKKDNITHLLFGHVPASISLGYEYRSLRQILKNIKAEQKKKFNELMMEDDFTYDKLKKEQDLYLFTSIKKEQFDEYLDKTRKIQELADKINDKSLSKEEKENLTSKKQTIAKKRGELLRDKFIDWKKFMEIYRSVAQKHGKILASLKGIEKEKVESQLLKYWALILKVNAQYKLVLIPRDKVQDAKKWIENHKNNKKTDTQELPQLYWFESLTFKSLQKLCWGHAETDNNEFRKNIISIIPKNKNNKPYTGEHEFEGKEQDKINFYKKVLQDKYTRDVLHLPFAQIDKEIISKNFDTLEDFKITLEKICYRRQVILNQDAEETLTKQFKAQILNITSLDLSRKSNESALKPHTQIWKNFWSDSNEKQHFDIRLNPEITITYRKPKPSRVHKYGKNSQNYDEKKKNRYLNPQFTLVTTMSEHCNAPQKNLSFITEEELKKEIDTFNQKFREKNQIKFAIGLDNGETELSTLGIFVPDFNKNTNEERLAQLRKVQEYGFEALTIKNLNYAERDYNGNPRKMIDNPSYFLNKSLYMRTFIKTEQEYERMFAEQFEKKHLLSLDLSAAKVICGHIVTNGDTRALFNLWMRHAERLIYFANDHIKEETAKKVLIKTIQELLPAEKEKLAESISKEKKYAKLSEQEKLRYFTWLFEDRKLYSFNEEENKKFNDILERKGNYAIGTVFSVTYLGEELVDVKSVFDIRLIFKKREEFYSILSEEEIMKELSRYNTNRTSHDLSNQELDLKLKTYKETIVANAIGVIDFLYKQYKQRFGGEGLIVKEDFDTPKIQEDLERFSGNIYRILERKLYQKFQNYGLVPPIKSLLSLRNQKVALDSIFNLGVVSFANPDKTSQQCPVCLEGKLYHGKKCDKCGFRATMMHSNDGIAGYNIAKRGFNNFQSLLPLKQ

SEQ ID NO: 142 - protein, 1067 aa, Unknown
  metagenome-derived sequence
  MISC_FEATURE (1)..(1067): Unk95
MAHNKPHLVDFRKMFLSLTRLCNETLIPICNDSICFPALDKLQDNARHEAIKTFASEDEREERKGLSLSIKDIKEYFEENGGYVPLGKVTLNRYTAEQKPNNFKEDIKKKINDLRLTDLIQKLINLSDEEIKEYFEFNGKQKKQLIDDTRLSVVERVQLFKYKPIPAAVRFMLAEYLHKNNLLDKERVMTLFEIIGKPRSIGEEYTKLKDTSDFDLFQYPLKPAFDYAWENVARNLRNDKANAYPKEQCIRFLENIFEVSTSTTAFILYADLLFIKDNLSTLEHEKNSPKDKDQFIENIKRTFKNINYGIEQKEYIKHQQTILDWINKKEDAQKELKNANDNSYKNYENAKQQFGLLRGRQKNSIRQYKDLTETFKTLAVSFGKNFAELREKLREENEINKITHFGIIVEDSKLERYVLLSKLDEDKTLSIDHLLIDEPKGELKSYQVKSLMPKSLEKIIKNKGGYKDFHTSSKYINFIEMKRDWANYKNKPELVDYVKDCLQHSTMSKDQHWAAFGCDFTTCNSYEAIERELEIKAYRLKASHISITTVQKLVNEENCILLPFVNQDITSAKRELKNQFSKDWDMLFENNNDYRLHPEFRIVYRQPTPDYPLNKRYSRFQLIAHLMCEYIPQSVEYISRKQQIQIFNDKNEQKKQVDAFNERVKPSGEYYVLGIDRGLKQLATLCVLNNEGQIQGGFEVFTRTFDSVKQEWKHNLLEKRAILDLSNLRVETTVNGDKVLVDLASILVKDEQHNYTKDNQQKIKLKQLAYIRKLQFQMQHEPQKVLNFIKDYTTPQAVGEKIGELITPYKEGTHYDDLPIEKIYDMLQQFHQFTDEGNETAKKELTELDSADDLKTGVVANMVGVIAFMLEKYHYNAFVSLENLCRAFGFAKDGLNGELLVSTAVDNTVDFKDQENLVLAGLGTYHYFEMQLLKKLFRIQTGNDIIHLVPAFRSVDNYETIRKLSTKTKDALYTCKPFGVVHFIDPMYTSKKCPACDSINVSRFSKQGDIISCNKCGFQTRWDTQTTLKNNALLQSYKKQNLNLHYILNGDDNGAYRIALKTFANLT

SEQ ID NO: 143 - protein, 1066 aa, Unknown
  metagenome-derived sequence
  MISC_FEATURE (1)..(1066): Unk96
MEKYKITRCIRFKIEPDKEHLQKIFSIVTNLNRSKENKKSNLLLLIQRCLELPKLLSDYIMAGDSHKLKSNVKVNYRWLRIYTKEQYYCWKKDNFEKRIRICDINYLNEIFKNFFKEWETVIARLTDDCNRPDEAKVRDSYIALSVKKLCSRSMFSFIKEFVENTYPKDTEDVKNSFVALLEEINKTLKQAEYDYLPSQSSGLVIARASLNYYTVNKKQKNYPIEIDEIEKKLKSKFFFNKNQFFNDLNIGDYCDFSLDELYPKLKEYKSKEKSKFLEAVSQKIVFNEIKTKFPLFKIDEHEFNEFVKISEDIIKKSTLRNSMQKGSINAENIKKGIKKLKQLRSDYFRAKDNKKNCNTKQQFKEYLKFCEIYKKIAKERGRLKAQIKGIEKERLDSQQLTYWALILEKGNAHYLILIPKENAQAVYNKLLKSGESSGNESTALYYFESLTYRALRKLCFGMNGNTFLPEIQKELPRYNQQDFGEFRFNISKDCSQKNEPELIAFYQDILKTDYVKKNMALPQDVFDEVAVKSYATLQDFSIALEKCCYTKKRIISEALKKEILEGSDAQIFQITSLDLRRQEKINLKDHTELWKKFWSSENEQNNYNTRLNPEISIVWRDAKKTRIDKYGKDTDLYDPKMHNRFLHEQYTLCTTISENSVSNEIVFTFKDRDKKEFEIKKFNEKINIYMRGKRSADNLWFYGIDTGLIEFATLAVIGNKKELRPFSVYEVKDLTYNKKGYVYNEKHEPVLREKPYMAIQNLSYFLNEDLYNKTFRDGKFDETFNDLFEKKQTAAIDLTTAKLINGKIIINGDISTLLNLKILNAKRKIYQSLIKNPHVLLFKNNEDAYKLFITDEKDAIYQSRIEFNFIKPHEEIINELNKYFADQQKNEARIEEQINNFRRTLAGNMVGVIYHLYMQYPGIISIENLSHSNIEGKRRGFEGLVERPLELVLYRKFQHDGLVPPISDLLNIRGSFDEKKNKNGLTQLGIIAFVDESETSLRCPECNEKAYPRSDSEEYKSDKRNKVFKCKMCGFDNKENPMGYAGLDSNDKIAAVNIAKKGMNLL

SEQ ID NO: 144 - protein, 1237 aa, Unknown
  metagenome-derived sequence
  MISC_FEATURE (1)..(1237): Unk97
METIEYQFSKTLRFGLTLKDHERKNKTHQTFNDLIGVSAQRIKEDASRDHDKTEQQLVTSVAACVKLMHQYLDAWEKIYRRTDQLALTKDFYKQMAKKACFDAYWLDNKERKQPQSQIIAISSLRKKHDEKERKDYILDYWADNISITKQRIHEFEKVIDQFKKALENKSMAHNKPHLVDFRKMFLSLTRLCNETLIPICNDSICFPALDKLQDNARHEAIKTFASEDEREERKGLSLSIKDIKEYFEENGGYVPLGKVTLNRYTAEQKPNNFKEDIKKKINDLRLTDLIQKLINLSDEEIKEYFEFNGKQKKQLIDDTRLSVVERVQLFKYKPIPAAVRFMLAEYLHKNNLLDKERVMTLFEIIGKPRSIGEEYTKLKDTSDFDLFQYPLKPAFDYAWENVARNLRNDKANAYPKEQCIRFLENIFEVSTSTTAFILYADLLFIKDNLSTLEHEKNSPKDKDQFIENIKRTFKNINYGIEQKEYIKHQQTILDWINKKEDAQKELKNANDNSYKNYENAKQQFGLLRGRQKNSIRQYKDLTETFKTLAVSFGKNFAELREKLREENEINKITHFGIIVEDSKLERYVLLSKLDEDKTLSIDHLLIDEPKGELKSYQVKSLMPKSLEKIIKNKGGYKDFHTSSKYINFIEMKRDWANYKNKPELVDYVKDCLQHSTMSKDQHWAAFGCDFTTCNSYEAIERELEIKAYRLKASHISITTVQKLVNEENCILLPFVNQDITSAKRELKNQFSKDWDMLFENNNDYRLHPEFRIVYRQPTPDYPLNKRYSRFQLIAHLMCEYIPQSVEYISRKQQIQIFNDKNEQKKQVDAFNERVKPSGEYYVLGIDRGLKQLATLCVLNNEGQIQGGFEVFTRTFDSVKQEWKHNLLEKRAILDLSNLRVETTVNGDKVLVDLASILVKDEQHNYTKDNQQKIKLKQLAYIRKLQFQMQHEPQKVLNFIKDYTTPQAVGEKIGELITPYKEGTHYDDLPIEKIYDMLQQFHQFTDEGNETAKKELTELDSADDLKTGVVANMVGVIAFMLEKYHYNAFVSLENLCRAFGFAKDGLNGELLVSTAVDNTVDFKDQENLVLAGLGTYHYFEMQLLKKLFRIQTGNDIIHLVPAFRSVDNYETIRKLSTKTKDALYTCKPFGVVHFIDPMYTSKKCPACDSINVSRFSKQGDIISCNKCGFQTRWDTQTTLKNNALLQSYKKQNLNLHYILNGDDNGAYRIALKTFANLT

SEQ ID NO: 145 - protein, 1159 aa, Unknown
  metagenome-derived sequence
  MISC_FEATURE (1)..(1159): Unk98
MQELLPCKIFLQTHRKTNMEKYQITKSIRFKLEPVKASQFEKEVENLKNAKEEEKNLSLLVSTAQDLSKLLKEYIYTDPNHEKKKFKSTVTVHYRWLREFTKDKYFELRMESPTEEPEKKATGHFASLASRLPQKTKKLISQEKQFKLYEVKYLPKVFEDFFKGWDKNIQDLSNIVSRPKESLTRKSEIGKVVLKFTERNMLLFLEHFIFESKEKDSSHLEFQLKDRLKEFKEVLEKVQKWAMPSQSTGFELAKASFNYYTINKNPKDFEKEKKEIEEKLFNYINDSSKSILSQKNLLKSLGIVKKEKEDTKYYFLYEINEQGILQKTKQGSYVTLDLLYKILKTYKAKQKQEFKAAMDKNPSYEDVIKIYNLFAPIDPNKNQDNLNVFNKYKELTKEIQKIGNDINKVQKDSLDHKRLNDKLSNLKQQRGKLFFKGSSKKNNQEPKEYFERFVEFCKVYREVAMKRGRLIARLKGIEKEKIDSQRLQYWAFLVEDKTGHQVVLIPKAQAKKAYQKISCFGETQTGSPAVYYFESLTYRALKKLCFKIQDNTFQEGILNDQLIQKNWKTYFQDIFDKNPNSDKRIGEHLFKKENGERDEEKLIAFYKDILRCDYVTKNREDGKIVLPNSLKKEVLETDFNTEQEFRIALEKCCYLRKRIVPKDELQKILSECDAQIFSITSYDLQKVDKSNLKAHTKLWLDFWKKENEQQRFPIRLNPEIKIFWREPKATRIAKYGKGTELYDERKKNRYLYPQYTLVTSFLENALQSEINYRFLDVEKKKENINEFNNKVNTFLKSKTELWLYGIDTGIVELASLCLIKKDKTPQMFEVLKVKEEYLNYEKTGFLQKGTPKPYKAIQNLSYFLNKELYKQTFLDDKFEEEFDKIFEVKQVPALDLSVAKVISGRIVINGDIPARLNLSLSNARRKIIEALIQNPSVQLSEENYKIKIANEIIFRGRKQFNEIKSWDEIKNTLNKFFQKDKDNPAKVQEDINKHRKVIAANITGVIHFLYKKFPGIITIEYLDQNKVESHRKDFEGIVDNPVEKALYRKFQTEGLVPPVSELWSIKTKDSQIGIIYYADSDDKEKGGHGLRCPKCEKKAYSNSNDDKYKSDKQNKIFECKHCGYDNHKNPMGLDGLDSNDKVAAYNIAKRGLEIINKKT

SEQ ID NO: 146 - protein, 1208 aa, Unknown
  metagenome-derived sequence
  MISC_FEATURE (1)..(1208): Unk99
MENYKLTKAIRFRLEPNEGSNLIQQQVEDMKNISFDLVSFISGLGNFNDLLKRYLLRARKDGLIKMNSSLSIKSGWLKRYAKQIFHDSEALRDKTRRKQTKTIGDFEGLSAEIEGRLETYLAIYQSLVNDGVAALNERARKANTGLLLKQLGNQNGLSYFVGLIEASVDKREVDDLSTQLKKQGKALQEELLAGIQKYLPEQSTGFPLAKASFNYYTINKKPVDYAQKIREQEGKLRITDWDAQVWSNSGLSNAIKAAVQWGITDLGSLRQKLKNIKAQQKASFNELMTQDLNFQELRENADLYLFSNITEHEFNQYKNLTEKIEDKATRINQSSNDNDKRQLRSDLQKLKKDRGALINAADKRNQNSFKTYKYFANYYRNIALKHGRILSTIKGIEKEAVESQLLQYWSLVLEQKGKHQLLLIPKQKAAECYQFVSAASAIQQSSTSKIYWFESFTLRSLRKLCFGYLDAGTNTFNQNIQEILRRHQYSEMDNRGRQNQVRIEGEFSFKGNTQKIIACYKDVLASRYTQSVLRLPVRQLRDEVIEPNFETLDDFQIALERICYKRYALLSEQNLDTITRRYQAQVFAITSADLEKGNDGNDKAHTQIWKKFWAQENEQTYFDVRINPELSIQWRPAKESRVHKYGRDSALYDEQKNNRYLHPQFTLVTTISEHSNTPTKVLSFMTDEEFKISVDAFNSKFNNADFKFALGLDNGETELATLGVYLPAFKQESNEASIAEIRKIEAYGFKVLSITDLTHQEKDTNGKERKIIQNPSYFLVKEQYMKTFGKTEAEYAAMFSKLFKESQLLTLDLTTAKVIKGHIITNGDVPSFFNLWMRHAQRLLWDMNDHAQKQTAKHLRLKRSEHLNDKEKEKFIEYLNSVRVNKEFQKLNAEEKSQYTQWIYALWNREAHSFSKEQVAKFAKVKKDQRVGYYSKYIILAVCYIGEDLQSATEIFDVRNIFKLRKDFYALKSEQEIIQDLNTYNTTESRQQIGNEELDLKINHLREAVVSNAVGVVDSLYKQYKEKTGGEGLIIKEGFDTNKTKEDLEKFSGNIYRILERKLYQKFQNYGLVPPIKSLMAVRSEGIKNNKGAILRLGNIGFIDPEETSQNCPVCATKFGHHQDVFVCQTCSFTPEKIMHSNDGVAGYNIAKGGFNNFLNPAPLIKKEEQKAANSNTKQYSNKNNTPRQKTAMEILLEKAGLKNKNNE

SEQ ID NO: 147 - protein, 1158 aa, Unknown
  metagenome-derived sequence
  MISC_FEATURE (1)..(1158): Unk100
MENYKLTKAIRFKLIPKSDNILTPEFSDKFNLIAFVSELNNFLDATEKYLFYQKNGNSYLNDKLTVKNEFLKTYAKQELAEYKERLKRNRNQNNRRQVLTIADYGYLEEKINIVFDEVNEIYSNLVDDAGADLNVRAKHERTGLLLKRLQSKLPFLKSLIENTSDKNETSNLSLLLKKQVDKLSNELLLGIEAFLPQQSSGLPIAKASFNYYTINKKEGDFANKIKESKEELTIDNIDRINLKSYFNKRAGIHEKNFQNNLWNLIKADIETAKENNTLLLGDAPMLNIDNYACLRQMLKNIKAEQKKQFNELMQNEESYSDLKNSNLYLFKGITEQQFNEYADKTEELEEIGTELSNQNLNENRRKQLQGQKQAKSKERGNLLKDKFSDWKNFANFYRQISQKHGKILASLKGIEKEQAEAKLLQFWSLILEKDGKHQLVLIPKTKAQDCKEWLEQNSQSSQGASVVWFESFTYRSLQKLCFGFAENGNNEFNQNIRNLLPRDERGNVQNGEFAFQGDEQRKIKFYKNVLSSQYANSVLKLPKEQLKKEVLDITFDNLDDFKIALEKICYQRFVKVGNDIEQKLKEWDAQIFELNNYDFEKQDQSNLKNHTQIWKEFWTEENKNNNYDIRLNPEITITYRQPKDSRIHKYGKESGRYDKNKSNRYLHPQYTLITTISEHSNSPTKVLAFMAEGEFGKSIDDFNAKTNKDTVKFAVGIDNGEVELSTLGVYLPHFNKTTNEEKVKELNAEKYGFEVLTIKDLNYSEIDYNGNKRKIIQNPSYFLKKENYIKTFNKTEEEYYHLFNTLFERKKTLSLDLTTAKVISGYIVTNGDVPALFNLWLKHAQRNIFAMNDHVKNETDRRVFLKNKLELDKEKQKFAEYISSEEKFSKLTDEEKKKYVQWIFEDRATLNITEKEENKFKKAQSKKGNFTSDILFAVCKNGSETQSVTDIFDVRNIFKKREEFYALKSQEEIIQTLNDYNTNRTSHDISTEELDFKLVTQKQVVVGNVVGVVDFLYKEYKERFGGEGIIAKEGFDTQKTELDRDKFSGNIYRLLERKLYQKFQNYGLVPPIKNLLEVRADGIKNNKEAVLRLGNIAFVDPSGTSQECPICVTGKLSHTTICPKNCGFDSKDVFHTNDGIAGYNIAKRGYINFKNEKR

SEQ ID NO: 148 - protein, 1077 aa, Unknown
  metagenome-derived sequence
  MISC_FEATURE (1)..(1077): Unk101
MENLENEYQITKTIRFKLIPQQDINNPYKNNNAAKDVSNLISKTQNTLILLKDILYAKDKNGGFIFKKDNSNKWRGDIKIKYTWMRNFMKTAFYANKEENPPKHYKLADLEYVQNEFDKRWFIEMQEIIDKLKDFQKSMENNEKEMQRDSQAALIISQLAKRNNFEFIKGFVLALCATNKPETDKLIDNLKKAISELEKELNIQKENFLPSQSKGVQFAAGSFNFYTVNKSPKMLGDYLIKEKAKLKRNFFIEEEHQGKKYWKPRDEYKEYNGIIEYLGLKNELQSKSLEEVYREIKKWKAKEKTKFMEALQANDDAKAKSIKLFESSDKHYNEIKNRILSIQELANKLNNPALSSDQKIKYKNKLKEIKQKKNDFFNTFISNPQTPKYKNLCNFYRKVAQERGNSIAKIGAIEKDKNFSEQLGYWCVIIEKEKRKFLYMIPRDEKDNMKKANDYISKLENITDGKSKLHYFNSLTLRALKKLCFKETDNTFRKTLQGKVVFPQYEQEWKDDKKRQIKFYQDILRNQKTLDLSAYENVSALCENQFESIEDFESEINKICYAKTVLVSDETEEKLKKEFNAICFEITSQDIEHSLKYPADGYRNKKYTEIWMSFWKDENERDKFPLRLNPEIKIMWRRPKASRIIKYGENSNLYDQNKKNRYLHEQFTLATTITDNAHNIKTNLAFKDVQDKGKAIIEFNKNYAVDKFNYAIGIDVGTNDLACLSIIDKNKKPQSFDVYEIRQDKLDFLKTGFLKDGQKREKPYRLIQNPSYFLNKDLYKRTFKEKKEDFNKTFDELFEKKKVSAIDLTTAKVIAGKIILNGDFSVHQNLKILNAKRKISQTLKDDPAVKIYEKDYKWYIENQKNAIYHSKILYNSYKPYDEIKKELSDFIKNQKLDDAHLEDNINKTRASLVANMVGVIDFLYEQFPGFIVLENLSQSIIESHREKFEGDITRPLEWAIYRKFQSKCLVPPISELLKLREKKRLNSNETEEESIHQFGIVKFINKRETSLLCPKCGKKAYNNSDDPKFKEDKNNTIFQCKECGFHNKNNAGEFSNLDTNDKIAAFNIAKRCFEANK

SEQ ID NO: 149 - protein, 1306 aa, Unknown
  metagenome-derived sequence
  MISC_FEATURE (1)..(1306): Unk102; Xaa=Gly
MINLESFKNLYEVRKTVRFXLNQPRKKSDINKTHXLLKDLVEISFEREKKLINNENNHVLIDTEKVLIEKLQQYVNXLEIQLKNWKXTYQRYDLIAINKDYYKILARKAKFDAMWEITKFDKKSNKYIKVKQPQASQISLSSLKIXNRSDSIIQYWXEIIEKTDYLLNIFKPKLEQYERAINDANSTHIKPDSIDFRKIFLQLLKLTKEFLQPLLDRSIIFEFSKKKVSQEIEKISEFAXEKNNTKIYNVLKNXEELRQYFEANXSQVPYXRVSLNYYTAVQKPNNFDQEIKKAINDLXIINFLKKSDSQIIDYLHQGSKQKIKLLLTSKSPYPIELLQLFKVKPIPFSVKYNLAKFIEKNYKNEINLSYEEILDKLNLLXRAIDIANDFKNSNNQNNFSLDEYPLKLAFDYAWENTARSLKRTIPFPKEVCKQFLKDNFDVDVNVDNADFKLYTNLLFIADNLATIEYNNPNNEAELINEIKQAFDSIDFSFDKERYXXYKNDVLVLLNKAKSQRDYSTILKAKQELXLLRXXLKNKIKKYRDLTQRLIDKKDSHFXIASFVGKTLAKIRDRLKEENELNKISHYGVILEDKNQDKYLLISQLDGKDTREKISQKFGNGDIKVYQVNSFTSKALNKFIKNPLSEDAKKFHXDFRYKHKEVSIYDEKGKWTXYQESFLSHIKKCLIDSEISREQNWEAFGWNFAGCNTYEEIEKEVNSKXYQLTENFISIGNLESLVKDEGCLLFPIINQDISSQKQENKNIFTLDLEKVFEXKECRIHPEFSIFYRKPMEEHKKENKSXIINRFGRLQLLANLGIEFIPRNSSFKTKKEQNRIAIDQKKQNQLVQEFNQEKVNTYFEGLDNYYIFGIDRXIKQLATLCITNKNXVIQDFDIYTKHFNSESKKWEYKFHRKDXILDLTNLKIESDKSXNKYIVDISLFQAKDEDXNPTGTNKQNIQLKQLAYIRKLQYQMSANEEXVLSFLEKYKNKEEREQNMKELITPYKEXKNFADLPMDIFQEMFENYYRLKTDQNLSESEKKNLMKITTELDASESLKKXVVANMIGVIYYLMKKYEYKVKISLEDLSNAWFFSKDGLSXDVVLNTKNDETMDLKKQDNLALAXVXTYHFFEMQLLKKLFKISTEEXILHLVPSFGSVKNYTEIFKDKGKYVYKQFGIVYFVDPRNTSKKCPVCLNTQTTXKKEXIPIINRNYKKSNIFYCERCXFQSIHSHCQEENIKDSNGFHYSVEEVERIEMKNKEAIEKYKKQXKNLHFIKNXDDNGAYNIXEKIRELPKKSDVKNTSISXNISFS

SEQ ID NO: 150 - protein, 1306 aa, Unknown
  metagenome-derived sequence
  MISC_FEATURE (1)..(1306): Unk103
MIMVNLENFKNLYEVRKTVRFXLNQPSKKSDINKTHXLLKDLVEISFEREKKLINNENNQVLIDTEKVLIEKLQQYVNXLEIQLKNWKXTYQRYDLIAINKDYYKILARKAKFDAMWEITKFDKKSNKYIKVKQPQASQISLSSLKIXNRSDSIIQYWXEIIEKTDYLLNIFKPKLEQYKRAINDANSTHIKPDSIDFRKTFLQLLKLTKEFLQPLLDRSIIFELSKKKVSEEIEKISEFAXEKNNIKIYDVLKNXEELRQYFEANXSQVPYXRVSLNYHTAVQKPNNFEQEIKKAIEDLXIVEFLNKSEQEITSYLHQDSKQKIQLLLTSKSPYPIELLQLFKVKPIPFSVKYNLAKFIEKNYKNEINLSYEEILDKLNLLXRAIDVANDFKNSNNKGNFSLDEYPVKLAFDYAWENTARSLKRTIPFPKEICEEFLKDNFDIDIHNADFKLYANLLFIADNLATIEYNNPNNEAELINEIKQAFDSIDFSFDKERYXXYKNDVLVLLNKAKSQRDYSTILKAKQELXLLRXXLKNKIKKYRNLTQRLIDKKNSHFXIASFVGKTLAKIRDRLKEENELNKISHYGVILEDKSQDKYLLISQFDGKDKRDKIVQKLXIXDIKVYQVNSFTSKALNKFIKNSXSEDAKKFHXDFRYKHKEVSIYDEKGKWTXYQESFLNHIKKCLIDSEISREQNWKAFGWDFSCCNTYEEIEKEIDSKXYQLTENSILKENLEKLVKDEGCSLFPIINQDISSQKQENKNIFTLDFEKVFEXKEYRIHPEFPIFYRKPMEEHKKENKLXIINRFGRLQLLANLGIEFIPRNSSFKTKKEQNRIAIDQKKQNQLVQEFNQEKVNTYFEGLDNYYIFGIDRXIKQLATLCITNKNXVIQDFDIYTKHFNSESKKWEYKFHRKDXILDLTNLKIESDKSXNKYIVDISLFQAKDEDXNPTGTNKQNIQLKQLAYIRKLQYQMSANEEXVLSFLEKYKNKEEREQNMKELITPYKEXKNFADLPMDIFQEMFENYYRLKTDQNLSESEKKNLMKITTELDASESLKKXVVANMIGVIYYLMKKYEYKVKISLEDLSNAWFFSKDGLSRDVVLNTKNDETMDLKKQDNLALAXVXTYHFFEMQLLKKLFKISTEEXILHLVPSFGSVKNYTEIFKDKGKYVYKQFGIVYFVDPRNTSKKCPVCLNTQTTXKKEXIPIINRNYKKSNIFYCERCXFQSIHSHCQEENIKDSNGFHYSVEEVERIEMKNKEAIEKYKKQXKNLHFIKNXDDNGAYNIXEKIRELPKKSDVKNTSISXNISFS

SEQ ID NO: 151 - protein, 1161 aa, Unknown
  metagenome-derived sequence
  MISC_FEATURE (1)..(1161): Unk104
MNNFKNLYELTKTLRFQAIPQNDKAKDKKIISETNPDIFKFTKQCQKIQENFLDIFCYKDAFEEENKIEFKKKRKIRYGWLRNYIKIDFYDWKKENNRNDKEYFLTEVDYLPKEFLRWINEWQELTNKLDEFVDKNEEEQERKSEIAFVLRGFLKRQNFEFIQEFVKAVMDLQNESGIELDKKIKELRELISETYRNLKACERKYLPAQSTGVCLYKASLNYYTINKTPKYYTKEKEKKEKELEMEIIDCKDKFGKPEFWFDKKFNFRENPLYWTLEDAYQKMKIWKADQKSKFNEKIGNFISDYLKKEFKEDEINQSRLEIAKNILKKYPLFSPIKEDFFISFLEQTKEIKIKSKQKNDILQKNGDIKSKEFEKIISQKLQNRKVLTEDENNFEQLSKEIANIAKERGKFFNAPNQTIQTKNYYELCELYKQIAMKRGKIIAEIKGLENEEVQSQMLSHWALVVQKREKRYVVFISRGENENHKKAHDWLERNKENLQKKSDDSVILYHFKSLTLRALEKLCFKEVENTFAPKLKQGGVKVNFTRIKKESGKEKIIDVYEFPRCKQELKTDNEKINFYLEVLRFEASRQDYELKQLDLVDFGGLKEFLEKSSGDFDNLQEFESELEKVCYVKVLLYFLEDQYDKFLDILNAKEFEITTRSISKESKRKENAHAEIWKNFWNDENEKSNYITRLNPEMSVFYRDTLDTHEGNRNRFSEPRFTLATTITLNATAKKSNLSFKTIDDIKKSIDKFNKGFNKNFRGEWSFGIDRGLKELATLNIVKFAKDKNEFGVSKPENFAEITVYKLKDGDTFLTDSSGNDLINAKGEKRKIIDNISEVLQENVEPDSELFEKQIISSIDLTQAKLIKGHIILNGDQKTYLKLKELSAKRRIFELFSTRKIDKSSEITGKNNFIIGGEKIYFATEWQKENKHWRTNREIIKADLKDYLLKLDKKNKFEDIEQIEKINHLRDAITANMVGIIFHLQNVLGMNGFIGLENLDVIRKELLENEKQEDKKMIEEHFDQSNEDISRRLEWALYRKFANVGDVPPQIKESILLRNDFLTYQIGILKFVKVGGTSRGCPNCKIFWDNGCGSKCNPKCSRCLENEEYKKSKNKNIYICKDVKKCKFSTEENRNLLEENLNNSDEVAAYNVAKNAFEETY

SEQ ID NO: 152 - protein, 1248 aa, Unknown
  metagenome-derived sequence
  MISC_FEATURE (1)..(1248): Unk105; Xaa=Gly
MKEFQNLYEVRKTVRFIAKPTKNSKSIIDFLKIXNKSDNNEKYKLLXEFLNNFNKIIDXSKKLFFYENSXNLKNFFKIKYKFLQSHTKYDFYDRKNLNKSNEKIYSFKDIDFIENFLITYFENLDEIHKNLKLYQSAQKEKQSRYREIXFYLQKLHGKNTLILKDLFEFLAKTNKSXIDNKIEEIKNLLPNFENKLINILKEFXPNNXIEIAKXCFNYYVLNKSSREYFNXEIEKLKKQQKXSLPKYIFNFKYKDENKKDIFVNLDEIFFKNIXLSKKEIEEMNLKEAYDFIKDFKAKRKSAFNQFVXNLYTYENLLENKKSKYKYKENXKLKEEEMSVELFCDIXEENFTEFKRLTNKIKEKXSKKNDILQXLXXLKKDELEKIIKNKEKNXEYLEESENNFKILSLEIEDLAKERXKFFNIPNEKIYTKNYKELCEFYKNIALRLXQNKARILXYEKQIVDSEKLIFFATIIERXDNKFLALIPKXKERLHQKAHDFLDKGENNNNDXTIKIHYFKSLTLRALQKLCFKEDKTVLVXIEDKNTFIRGIEKELSLNPETQNKKYFFKXKLKRFDEFKIYNRFLKKEEWEIDKQLLIEFYQDVLQTKSAKKVLDIKDFXLDNVLNETFESLDDFEIEFEKIAYIKKTLKIDEIXYQKFIEDFXVFLYKINSQDLSINNIEHKNKKHTDYWLNFWDNFKNKNYDIKINPEFSLYYTLADKDLKEKKEQXLLKEPIKLSXLRNRKTKPQLIFTTNFSLNSNEKSENLAFLETSDLKENIEKFNNKLEEDINQRYSQNDLWYFXIDRXINELATLSVTKFLNTKNFEFAKIKCLKLKDEYDKIIDIKTDEKXITKYIFEKSDYITYYDKDEPHKRSFEISKNISYFLNKSDFFETITTXIIDLTQAKLIXDKIILNXAKSTLLKLKELSAKRRIFEKYNEIDKNLDITSXKXNSXIFIKLNNXKYIQVYWFNEDLIITSQEKKEIRKYRENLHLKIIEIFKTYFKEIEKNNNFEDLETISKINHLRDAITSNMIXIIYFLMTKKNXYFXKIVLENLDDTIXFTXIEKTKTKKXKFDGGKEYTXEEIKMIDGHFYQSNTDISRRLEWSLYRKFQGIXYEXIXLVPPEIKQSVFLKDDFXVYKFXIIEFIKTGXTSSTCPYCEIKSKDKPXLKQHHEKDNCXFKKQVXEYLEFYNKDNSINYDSIAAFTVXKFSFEXKTPKFEKTKKVVEYSKVKREENVVFKRSKNLSYNKK

SEQ ID NO: 153 - protein, 1180 aa, Unknown
  metagenome-derived sequence
  MISC_FEATURE (1)..(1180): Unk106
MSDKNQSFSQFTNLYELSKTLRFELKPSEITFEKLENNKLFKVKDVESKIFSKNENGEISEAEKKVKNYLFDINETELNNLVKKCDEKIEEIKKIKDFLEKNPDKLWQVWIDNEKIKIIDKDLKYILQEKKSWEKSFWNEAKNDKKTGNLGVQSTFRVEWKKGLFLTFDDVDAYFEKIRSTENSERKVGEFTKQVIERLDFLLKQYRIRELQLLLNTKGDTEQNEKKLFQTKKERVARIRNYLGIFLKLERICSLFNYTYEDSFCEFPLELKENLEEYNLDLKNIISEVETIFSESNLYLHKNIERKFTLNIRAINPRPESDDPKNNKKLTEDKILEKIEELEENISNAKRLKAELKGERSYKKNNGERNYEDHKKQEWDTVLKELNPSNEAGLFSQLTQLRRDLEEVHLTHFGVLLEKDGLFYLALENKRVNNGKNGDIKKMGDFELQNFFKNKNKGNAKYLSYKNITFKALRRLCLEKTSSMKTKYFLNKENESWTEFTEKGRRKREQQKNWREEKYFDDLKQYLQEILKNKAGKIGVKFTDNDFKEWENIEWDEDLKNLSNLIDKQGYKATWNNFDWDALQELEESTEIEIFQIYNKDFLIDPDFAVSDKDKEKVERMQFTKDKLEKEGKKFIPKYKNPNKKEKQNLYTTYWQNFFADKSNKEFRIKPEGKFYVRLASEDAGENGNKKLLEKETKKEFEKIRRIRFTEDKILADFNLWINPTIDKVQSKVKKKSEVKNHIDAMNKIHKTDETDFYVLGLDRGLNSLVSYGLFDSNLNIVQINGKGNFQETQNKEYDNTLDFVCGDWSLVNSKGVFVKREKIFDDNEKNKYFLKCCDILFYQLKKYLDIPFVNPETDKKLLIDEYYNQFIYDSEKGEYSLKILDYEGKQSGNSGELGEYYSFVILENDNESDRNYELRDENGNEIIIRDKDDNKVFDYVLSFYVEKAKRIFALKKQQDFNSALELTKEEVEEVKEFLFQSVEELKEGFTNFVIGEIVKLSKNIAEQKNKKLYIVFEDLVNYGKNKGEELEKSFTEMRHEENLSVLVYQKLENNLVEKFNYLQTKDKDSNINKTQFSPKIQRIEDIKELQKEDKKGGQLGNLIFVDPENTSKQCPNCLEIGQRKHSRPTHDFVKCKKCGFDTRNDDTKKGFDFIDGGDTLAAYNIAKRGLKFLKEKNNL

SEQ ID NO: 154 - protein, 1418 aa, Unknown
  metagenome-derived sequence
  MISC_FEATURE (1)..(1418): Unk107
MQDTKSLQFKDNPYQYTRGIRFRIQPVVESERFSKKIQEIQSADSAGSDLSDLAENLLTFHKDLEELLFYQFVSARSENPDSCRKEKIQKKLKHDQYKQSKEDQKIGQPVLQEKKTNTSKADQEVKLNSRISVKKAWLREFHKDLFYLEVGKKQDGKYKARKYRLSELKSIGGELKERLKGWERYSLELKKASGQPRESRHSDIAEYIRSLSGRDQLTYMERFLEEISGSDPGSDEKINSLKSQLNSLKEKLKSAQEFYFSSQSSGVEVARASFNYYTVNKRPKNYYEEKPKEIEEKLKEIEEQLYGSHLKFQNLIEEKKQENSGEGSGFSIIKETTNETYCWKKTEQRNQENSGSYSGEKKDNSMDIFSFVSDQEKKWIKNYCKKHQQNDLEKDDVFLSLDETYRAMKAFKAEQKSIFYEIVTHIASKQNNSYENKNSNHLLKGWQFPYSQQNLKGMNTAFSLFQFTDKTIKSSRYTIDKILSSCKEGENQSQNNKVTSEKCYQKFVALTRQIQESGNKKNNNNRGTISDKSQNPKKDRGIFLFGSNCYFKEYGKFCETYKGIAQKRGRKKAQIKGLEKEKREAVQTDYWALIYCNQDKRQLWLVPKEKMQKAKIEIDNKNNEKGDSLGGSHYLCCFESLTMRALHKLCFSEQSEQSGGFVAKMPEELKHLQKESKKIKTDGDVGELEKKKQKQLNFFKKLMVSDYAKKKLCLENFNLKKAIEAENLETFEKELEKACYYIKKVNFPEKEKDDFIRIHNISVLDISSYDLEGRNKNTYQTPLSENRYHTDLWKLFWDNIDNSDKKNTKVKGFRVGEVRLNPEVKVYYRKADDNLKKYFKKRNFPSKFNHRKLNSQWTVHFTLSLNAGKKYEDLAFIKPEKLLEKIDDFNQKLNSQMDFKTVWKYGIDRGNNELATLCLVRFNPDKKLYKINNKTIVKPVFPKDDNASETTTCWTLKNSSYKEEHTTKKGETRTRWAINNLSYFVDEKYLNNRELFEEKNIACLDLTTAKVIKGKIITNGDVLTYLKLKKTVAKRQLYKLFQKGKITENASLTWSMQENGSPEEERYRPEGVLNIKTSNKEETIYHYCKRFEDILINKENNITYSQQSIKNSLNHYLNQLRQNNKEHTPKILKINHLRNAVTANMVGVICHLQKTYPGFVILEDLSKSDIDRHCKNEENISRRLENALYNKLQSLGLVPPHVKDIIQLREKQSKIKSQRQKERENDFKDLKRKQDRKKELGKNIESIKKGIKCARNSEKKEELKNKLKDKKEEKNGIEKEISKLKNKLSDEKNQNQSSQIGAIVFIPKEETSKSCPYCEENQQKQNEKDKTFGKRKNEEKFKQHRFICGERQPCGFDTYHFKKEEDRAENYTPEPDKQKYKEDFKWFEALDDPDKVAAYNIAKKITDPEKIGKMNQDS

SEQ ID NO: 155 - protein, 1034 aa, Unknown
  metagenome-derived sequence
  MISC_FEATURE (1)..(1034): Unk108
MLKYKLTKAIRFKLNAEHAPSLTAKAESLQAAEPEGQPASLVNEGYNLANIFEKYIFSDKEKKKLSPSVTIHFRWLRQHTRYAFYEWKGEDTLKDKKPKLADVPYLPEKLAGLLSEWRNTLETLNIAANAPKESNTRKANMGLAIRKLGTRSMFPFIESFIKDSNPKDSDELKSQILQAIDRFKTLLNECEYWSMTSQSSGLEIARASFNYYTINKKPKDFNKEREKVEKNLSALPQEIRLSAIPGYKLFIKYNEEGNQYVIKLKMNDKELWETVNLKSLYKGLKHFKSEQKSAFAQAITQGLEYEKSERFPLFYGYPDAFNRYVELTNKIQKKAEKKNNAKKDSEEAKKLGEEISRLKQKRGKLFFDEQNKSGEPKERFEKYVSFCSVFKDVAIKRGQLIARLKGIEKEEIDSQRLQYWAVITEKNGRHQVALIPKQNAQKAYKQIREWREQPGGSVIVYYFDSLTYRSLKKLCFGINGNTFLPEVKEELTKQIQWNYPEGDFGEHTFKNNDSSRDEQALIAFYQKVLSTSFVKQNLTLPPNFAREVLNKDFDTEQDFRIALEKCCYVRHKKISGEQLERFLHNNNAEVFSITSFDLERLDRKKDEQRKAHTRLWLDFWKPENENEKFPLRLNPEITVTWREPKKSRMEKYGEGTPLYDPGKKNRYLHPQFTLVTTFNENALAPEINYAFQNAKQKGEAIISFNKQVNAALKSKYENDNLWFYGIDTGKVELATMCLMDKNKKLQPFSVLELREGKLDYEKTGYLKEGTQKSYKAVKNLSYFLNPELYEKTFRDVNFQKTFDELFLKKEVPAIDLSKAKVISGHIVLNGDIAGYEKLNTLSNMRQEQREQTITLDKINHVRRLIAGNMVGVISHLYKNFPGYLLLEDNAQSWIEDERLKFEGRVERPLEWALYRKFQGYGLTPPLSELVRLREQEKFKISNGSQPRFATIKQFGVLILVNKEGTSLHCPNCGKKAYQNDNEIMPDKSQKIFQCKHCGYHNRNNPLGLDGLNSNDKVAANNIAKRGLEKFLKEI

SEQ ID NO: 156 - protein, 1013 aa, Unknown
  metagenome-derived sequence
  MISC_FEATURE (1)..(1013): Unk109
MIYKNYEFTRSIGFNLKEKDTQKIYPSFDRKFNSEKDRQEILKNFLNEYDNLINAFKKVVFYKEGEISFKLEIKYPWLKRYTKKQYYNSHNDKVKKYTVKEAPYLKQVFNDWLNANNELKNEMKDVFIRELHTQAKESDISLLTKKFLGHDNFSFVRDFIQYANCKDSEQYLDELRKVVEKIRTIAEDILQVTSPKQSHGIEVARGSFNFYTINKISKNFDEDISKWKDKFKQPSYNIKNIGYGFPDYIKTNYGVYKQDDLSIESLYKALKEFKSQQKKLFLEAIDKGEDIEEIKRKFSLFHRKNGLEEFINTTKQKRSKFFQNKWGFPNYIEFCDYYKKIAQERGRIKADIRALEQEKEEARLLMHWAHIIEYNGARKLLLLPKKGDNLYQAKKYLENINSLQGGDYILYSFNSLTLRVLNKLVRRNIPKEIPNLNEDPVAIYKKVLSGYYKKIDLDFLGFENQIQTIISKEYQNEEEFRIALESISYSLRKIVLTQKNINKLQNDYGALLLDITSYDLERKINNKKEHTALWEEFWSKENWSNNFPLRINPEFRIFFREKIKNQSYKKKRNRFSEDNLMVFFNLTQNVAQNKMEVAFKDRDGLVATVKQFNQDVVEPLIKETRDNLYYYGIDRGHTELATLGIVQFSNEKYRVEYKNGEVKEFCKPIFTKVKTYRIKDNYLNLTKEIEVDRKGNKKEVNIIENPSYFVEDDVLEEVNSSFINLTKAKLIKGKIILNGDVKTYLNLKEENAKRKIFNIYNEIVEESKIEYVDESHPASSKNQLKNAFVVPLTKKNRGHEILCYFDNEIAKYRSLKDMRKILQGYLDKLRANEQTEGISIDRINNLRDAITSNMVGIAAHLFEKYPGVINLENMNNTLENFKKNNEDISRRLEWSLYKKFRKYGLVPPLLRQTTFLREEGGKSDKSNKINQFGIINFVPIKNTSGECPYCRRKKTLKERKEEKFSKNSYFCPECDFNTKSPPIFMRSIDDSDKVAAYNIAKFGLGIRRGKNIK

SEQ ID NO: 157 - protein, 1034 aa, Unknown
  metagenome-derived sequence
  MISC_FEATURE (1)..(1034): Unk110; Xaa=Gly
MHHSLQNNLNFFEVHKNIRFLLEPLFDEKDMIENKNXIKNNTQIFLQKYEFIIKQLNFILLNSRKRTLNAKLKIKFCFLKKHTKTLYFEYGIDTLKNKHKNQIEMNKKELEYLVNIFENFFHKNLDYIEKLKILLHTPNAQNKDIQYYFHQILRRXNFNFIQDLSESINTEIPNTYGKIIEIKETLENLEYIKKSLQDELYQQQCFGNTIEVVNLNYFLVNKKSKNYTELITNKKNTLQHHIFAFPKFLAATNNNGLKDFETYYNINYSEXKLVETYELLKEYKSSQKEGFLQFISSGYTYNDLIHHKNFLFKSRHFDTKEFMLSIYLFDDISMRDFNIIQDLSLKIMFLIDLENYPEKITSSKEKYKELFXEDILTDKAYIEDTKXKIMKKLVSIKRQRXMLFNTESRYCVFRKYINFCAEYKKITLEIGKIKSHIKALKTEQKQIDKTNSWGLILEKNSQKFLLTIPREQQNVPYFDKSNNILQARHFIKSLSYQNDDSTLFYFEALNLQILDTLCFSKENTNFRNKIAKELYGINSHFVEKKEFTKLNKTIEVYNIKMKYELPKNIYGETSKSTLLQFYQSIIKLNSLKEHLIIENPIEFENFTKKDFTSLDEFEKKLKEICYVKKIFNISEDNLDFLIKKFDXRLYKITSYDLEKNLKRENIKPHTKIWLDFWNEKNQINKYPIRIKPELKISFIKKDDSLSEKNSDIKRNRKLENRFLLTTNITEHACKHHXIISENTTKQIIDFYENFNQIFEKHPSTEILXYNYFIDVYENNSIHLSIYENQNTTYIPIESYELKEDFFSMTNEKXTKIYKNISYFQYDEHQNLYSKQENQYIDLQTAKLINGKIYSNXDISTYLNLKMISAKNKISHFSHEYSHIKISQENPENIVLYXXDKQEVVIYNFDKKYDSILSQSCIIHELEDFLERKNIEXYFSEDISIQSINNLKNALCXNMVXVIFFLQKNYPXKIIIRNFTHKNYSRSLYSLGKNFEEKILQKLSSLSLIPSNYKHIFTLKENNTLNKLXIIEFVN

SEQ ID NO: 158 - protein, 1176 aa, Unknown
  metagenome-derived sequence
  MISC_FEATURE (1)..(1176): Unk111; Xaa=Gly
MSYIMNEKEMQNLYEVRKTVRFELVPQFIXTNKKPAXNTENRVKFIFENLIKLTDLHSEFVNLLXKTLVNEREKIIKEEENDNNQSKLFSKELLEKFGLSKKESLTSENSKIINYFYDYEIXSLVQFKYKXLEQVFKNDWIENKKKIKYTIDKYXNEKKKNKNYITLTDLXENNFIKKYFEEWFENNKKINTELNKFKFIENDLSRISDIXAEIQRLNGRNYLXKLYTLFEXXYLVHKNDVNIINNLKEKLAEIKKLIKTLLELTKPSQSFXFPIEHISLNYYTRNKTPKQYEEEIKAKETLLKQPYLXKLXNLYXINKNSSIEELYKEMKKIKAREKSAFMQLLQKEIPYENIQNPFVYKDFEXNEHDDYKIQLFSNIKEXEDWKTKEKLTSKDIYNKVLNLTKQIEKETNKQEKTKLKEKRXEHYFMXNKVFPDYFSFCEDYKKVAREYXERKAEVLTLEREKILAERERXWXFITKNESXEYFVNTISIENTQKVYKYLKDXNMLEKIXDTSYFIFNSITLRALDKLCFKKDSSFAKDIKIKIDKKFLNEFKSHDXKIIEEIKSKNQLIEENELLNFYNEVFEVQTTLXIMYRDGETSQNILKNSQDEEEFEINLKLECYVLDEFKTNQEKIDNLLKNNNXNSYKITSWDLRGKREKPEEHTKWWFKFWDSKNEENKFPLRINPEISISYVEQDKNFKKLKPNQTNNRRTRERFLLVTTLSHKANSKYIDSAFTLDKKQENIDIVNNSLKKYDYFYXLDKXTNELITLXIYKKXENXKIEPVNISEKIEVYKITDNXLNKTKDVINKGXSIKTHILYKNPSNFLEFINDNSIFEKQEQEKNIISCLXNLTSAKVIDKKIILNXDVNTIKKLYEINAKRFIYIFIQEQXKSDEKIIFDDKDQVFRFGXKXIYYYNENVKNFISKEEIEKKLNDYILQIKNFDPKKDELEDISINKINHLKNAVCANIVXVIMRLQEIDLFPXYIVYENLKISTSNSDLEKQNTFLXNLINEKIYNKLQLTNEVPAILKQFRSDLDEKDIIQHXKIIYINKNFTSTACPVCNETLTKTENXKVVDKKDNEINKLXXHMSDFEKKMTHLTDKEYQDWLKNESFKKANMSKXKIDKNKYQSXNIRXKTCEFHLQNSKYLEFNFLTSXDDLATYNIAKKXLEYIKSLN

SEQ ID NO: 159 - protein, 1173 aa, Unknown
  metagenome-derived sequence
  MISC_FEATURE (1)..(1173): Unk112; Xaa=Gly
MGEFRNVFEVRKNVRFELESNILFRDLKINSNCDDENLLKSFNESYKSFIELLLQNFCKRKNIVTEKKEVXNNIFANAFKKAXINVEENSKENKNNEEKYEYEWFKTIQFLHKXLEELFINDFIENRKEIKYDRNGKKKQHNYITFXDLXDKNFIKIFFENFFKEIDVNLKELKYFVTTXLENKSRTSDILFLVQKINSREHLXKLYTMFEKNYIQHKNDSSVIERLKISILNLKENIEKLLIELRTSQSFXIPIEHVSLNYNSINKTEKEITKDIKEVLKXNNLNKKYKWTFEKKDNLEKNEKSIIKTFNLKEKDSLKLIQDELNIEIDISEFKEKVKLFKAKQKAXFLQLLQNKVPFEDFKNSFNFEFMXENFNDFRITLFSDISKENYDEMLKLTKKIEQESDKENRKKLKMQRXKFFQFRLKKFKDFSENYKKIAQKYXRDSTEIKSLERQKIDAIKLRXWXFLSKEDNNYFINTFDVDNSKQVYKEIKNLQKDXNDIKIYTLSSITLRALDKLCFKKDSSFIKHINTRDFNERVSLDNXKSFWRLKNKTTLLEEXRLMNFYIYILENQVTLNIKYKSKNSLNILKNSKDIEEFEINLKLETYELIEKNISKQTYKNILNNYKXNSYKITSYDLEKXLETKKYTTWWFNFWKKENKNDKYIIRINPELTIFFKEKNKDFIKENSDIKKNRRLEDRFILSTNFSFHSNKSYIDSAFINDEKRKNSIETFNEIFNXKNKLDYFYXLDKXTNELITLSIFRKNXEKIEVVNISEKIPVYRITNKXLNHFEYIKDKKTXECILDEKTXEKKKRFLSKNVSYFIKDLQNKELFEKLEIKSCLXDLTYAKLIKXNIILNADIFTTLNLYKVTAKRFLNDAITKXNIESDRILYNESDKIYYYEYLNRXNKYTKVILYWKDEFDFLPYKEEKFNSLKEEVEDELNQYIKDIKLFLQNSKKYNNNENISIQKINNYKNAISANIVXIIMKLQEYFNXYICYESLDEXQILKKXLSTFIXNVVNEKIYNRLELNLEVPPILKKFRTDIXXKQIIQHGKVIYVDENNTSKACPRCNEYLLKKDKNXNLIEKKGDXEINKLXXHLMXEIWEYNMHHCDNPKNCPNIENHISKENKAKCDYHMKNNNYXFDFIKSXDDLAAYNIAKKXLEYINFINSNTTS

SEQ ID NO: 160 - protein, 1119 aa, Gracilibacteria sp.; identical to SEQ ID NO: 131
  MISC_FEATURE (1)..(1119): GbCms1
  MISC_FEATURE (1)..(1119): GbCms1; Xaa=Gly

SEQ ID NO: 161 - DNA, 3195 bp, Smithella sp. SCADC
  misc_feature (1)..(3195): SmCms1 native DNA
atggaaaaatacaaaattactaaaaccattcgtttcaaattgctgcctgataaaattcaagacataagccgtcaggttgctgttctgcaaaattctacaaacgcagagaagaaaaacaatcttttaagattagttcaaaggggtcaggaattaccgaaactattgaatgaatacatccgatacagtgataatcataagctgaaatcaaatgtcactgttcattttagatggttgcgtttgtttacaaaagatttgttttacaattggaagaaagacaatacggaaaagaaaatcaaaatcagcgatgttgtttatttgtctcatgtgtttgaggcttttttaaaagaatgggaaagcactattgaaagagtaaatgcggattgcaataaaccggaagagtctaaaacaagggatgcggaaattgctctttcaatcagaaaacttggaatcaaacatcagttgccattcataaaaggttttgttgataatagtaatgataaaaacagcgaggatacgaaaagtaaactaacagcgttgctaagtgaattcgaagcagtgttgaaaatatgcgagcaaaattatttgccctctcaatcttcgggcatcgcgatagccaaagcaagcttcaactattataccatcaataaaaagcaaaaggattttgaagctgagattgttgcgctaaaaaaacaattacacgcaaggtatggtaataaaaaatatgaccagttgcttagagaattaaacctaatccctttaaaagaattaccattaaaagaattaccattaatcgaattttattcggaaatcaaaaaacgtaaatcaactaagaaatcagagtttttagaagctgtttccaacgggttggtctttgatgatttaaaaagtaagtttcctctgttccaaactgaatcaaataaatatgatgaatatttaaaactgtccaacaagataacgcaaaaaagtactgcaaaaagtttgctttcaaaagatagtcccgaagctcaaaaacttcagactgaaattacaaaattaaaaaaaaacagaggcgaatattttaaaaaggcatttgggaaatatgtccaactctgcgagctgtataaagaaatagccggaaagcgcggaaaattaaaaggccaaatcaaggggatagagaacgaaaggattgattcgcaaaggttacagtattgggcgttggtgctggaagataatttaaaacattctttgattttaataccgaaagagaaaacaaatgagctttacagaaaagtctggggggcaaaagatgatggtgcaagttcaagttcaagttcgacattatattattttgaatcaatgacttaccgtgcattgcgcaaattgtgctttggtataaacggcaatacttttttgcctgaaattcaaaaagaattgcctcaatataaccaaaaagaatttggagaattttgttttcataaaagcaacgacgataaagaaattgatgaacctaaattaatatcgttttatcagtctgttttaaaaacggactttgtaaaaaatactttagctttaccgcagagtgtatttaatgaagtagccatccagtcatttgaaacaaggcaggattttcaaatagccctggaaaaatgctgttatgcaaagaagcaaatcatttccgaaagtttaaaaaaagaaatactggaaaattataacactcaaatatttaagatcacaagccttgatttgcaaagatcagaacaaaagaacctgaaaggacacacacggatttggaaccgattctggacaaaacaaaatgaggagattaattacaatttgcgtctgaatcctgaaatagcaattgtctggcgaaaagcaaaaaaaacaagaatagaaaaatatggtgaaagatcggtgttatatgagccggaaaaacggaatagatacttgcatgagcaatatactctttgtaccacggttacagacaatgctttgaataatgaaattacttttgcctttgaggatacaaagaagaaaggcactgaaatagttaagtataacgaaaaaattaatcagacattaaaaaaagaattcaataaaaatcagttgtggttttacggcattgatgcgggcgaaattgaattagcaactttggccttaatgaataaagacaaagaaccgcaattgtttacagtttacgaacttaaaaaattggacttcttcaagcatggatacatttataacaaagagcgtgaattggtaatacgcgaaaaaccgtacaaagcgattcaaaacctatcctattttttaaatgaagagctttatgaaaaaacattcagagatggtaagtttaatgaaacgtacaatgaactgtttaaagaaaaacatgtatccgcgatagatttaacgacggcaaaagtgataaatgggaaaatcattttaaatggcgacatgatcacttttttgaatttgaggatattgcatgcccaacgaaaaatatatgaggaactaatcgaaaatccacacgctgaactaaaagagaaagattacaaactatatttcgaaatagaaggaaaagataaggatatttatataagcagattggattttgaatacattaaaccttaccaagaaattagcaattacctgtttgcctattttgccagtcaacaaataaatgaagcaagagaagaagagcaaattaatcagacaaaaagggcactggcaggcaatatgataggcgtgatttattacttgtatcaaaaatatcggggcattatctctattgaagatttaaaacaaaccaaagttgaatcggacagaaataaatttgagggcaacatcgaacggcctttggaatgggcattgtaccgaaaatttcagcaagagggatatgtgccgccaattagcgaacttattaaattaagagaacttgaaaaatttcctttaaaagatgttaaacagcctaaatatgaaaacatacaacagtttggaattatcaaatttgtaagcccagaagaaacaagtaccacttgtccaaagtgtcttcgaagattcaaagattatgataaaaataagcaagaaggattttgtaaatgccaatgtgggtttgatacaagaaatgaccttaaaggttttgaaggtttaaacgaccccgataaagttgcagctttcaatattgccaaaagaggatttgaagacttgcaaaagtacaaataa

SEQ ID NO: 162 - DNA, 3705 bp, Sulfuricurvum PC08-66
  misc_feature (1)..(3705): SulfCms1 native DNA
atgatgatgttacatgccttcaccaaccagtaccaactctcaaagaccttgcgtttcggagccacattaaaagaggatgaaaaaaaatgcaaatcccatgaagagctgaaagggtttgttgatatatcgtatgaaaatatgaaaagtagcgcaacaatagccgaaagcctaaatgaaaatgagttagtcaaaaaatgtgagcgatgttatagcgagattgtaaagtttcataatgcttgggaaaagatctattatcgaacagaccaaattgcagtatacaaagatttttatcgtcaactaagtagaaaagcgagatttgatgcaggcaaacaaaatagtcagctgattacccttgcatcattgtgtggtatgtatcaaggtgcaaaattatcacgctatattacaaattactggaaagataatattactcgtcagaagagttttttaaaggattttagccaacagctccatcagtacacaagagctcttgaaaagagtgacaaagcacatacaaaaccaaatcttatcaattttaataaaacattcatggtacttgcaaatcttgtaaatgagattgttattccactatccaacggagctatttcatttcccaacatcagtaaacttgaggatggggaggagagccatttaatagagtttgcacttaatgattacagtcaactcagtgaattgataggtgagctaaaagatgctattgctacaaacggagggtacacaccatttgcaaaggtcacactcaatcactataccgcagagcaaaaaccgcatgttttcaaaaatgatattgatgcaaaaataagagaattaaaacttatagggttggtggaaacattaaaaggtaaatcttctgagcaaattgaggaatatttttccaatcttgataagttcagcacctataatgatagaaaccaatcggtcatagtgagaacacaatgctttaaatacaaaccgataccttttttggtcaaacaccaattagcaaagtatatttcagagccaaatggttgggatgaagacgctgttgcaaaggtgttggatgccgttggcgcaataagaagtcctgcacatgattatgcgaacaatcaagagggatttgatttaaaccattacccaataaaagttgcatttgattatgcttgggaacagttggcaaatagtctttatactactgtcacttttcctcaagagatgtgcgaaaagtatcttaattctatctatgggtgcgaagtgagtaaagagcctgtttttaaattttatgcggatttgctttatattagaaaaaatctagccgtgcttgagcataaaaacaatttgccgagtaaccaagaagagttcatttgcaagataaataatacatttgaaaatatagtattgccatataaaatttcgcaatttgagacttataagaaggatattttggcatggataaatgacggtcatgaccataaaaaatatactgatgccaaacaacagttaggttttattcgaggtggcttaaaagggcgaattaaagcagaagaagtgtctcaaaaagataaatatgggaaaatcaaaagctactacgaaaacccatatacaaaactaaccaatgagtttaagcaaatatcttcaacttatggcaagacatttgcagagttacgagacaaatttaaagagaaaaatgagataaccaagattacccattttggtatcatcatagaggataaaaatagagatagatatcttcttgcaagtgaattgaaacacgaacaaataaatcatgtctcaactatactcaacaaactagataaatcatcagaatttatcacctatcaagtcaaatctttaacctctaaaacattgattaaacttatcaaaaaccatactacaaaaaaaggtgccatatcaccctatgcagattttcatacttcaaaaacaggatttaataagaatgagattgaaaaaaattgggacaattataaaagagagcaagtattagtggaatatgtcaaagattgtcttaccgactctacaatggcaaaaaaccaaaactgggcagagtttggatggaattttgagaagtgtaacagttatgaagatatcgagcatgagattgaccaaaaatcgtatctactccaaagcgatactatctcaaagcaatcgatagcatctcttgtagagggtgggtgtttattgttgcctatcataaatcaagatattacttcaaaagagcgaaaggataaaaaccagtttagtaaagattggaaccatatttttgaaggctcaaaagagtttagactacatccagagtttgcggtctcttacagaacacctatagaggggtatccagtacaaaaacggtatggaagattacaattcgtatgcgcctttaacgctcatatagtccctcaaaacggggaatttatcaatctcaaaaaacagatagagaattttaatgatgaagatgtccaaaagagaaatgttactgaatttaataaaaaagtaaatcatgctctatcggacaaagagtatgtagttatcgggatagatagaggcttgaagcaactagccacgctgtgcgtccttgataaaagaggcaaaattttaggcgactttgagatttacaaaaaagagtttgtccgagcagaaaagagaagcgagagtcattgggaacatactcaagcagaaactagacatattcttgacctatccaatttacgagttgagacaactatcgagggaaagaaagtattagttgaccaaagcctcacgcttgtgaaaaaaaacagagacacccctgatgaagaggcaacagaggagaacaaacaaaaaatcaaactcaaacagttgtcatatataagaaagctccaacataaaatgcaaaccaatgaacaagatgttttggatttaatcaacaatgagcctagtgatgaagagtttaaaaagagaattgaggggcttatctcttcctttggagaggggcaaaagtatgcagatttgccaattaataccatgagagagatgataagcgatttacaaggtgtgatagctagaggcaataatcaaacagagaaaaataagattatcgaacttgatgctgccgataatctcaagcagggtatcgtagccaatatgattggcatagtgaattatatttttgctaaatacagttataaagcgtatatttcgctagaagatttaagtagagcctatggcggtgcaaaaagtgggtatgatggacggtatctgccatcgactagccaagatgaagatgttgattttaaagaacagcaaaaccagatgttagcagggttgggaacctatcagttttttgagatgcaactactcaaaaaactacaaaaaatacagagtgataatactgttttgcgttttgtcccagcctttagaagtgcggataactatagaaatattttgagattagaggagacgaaatataagagcaaaccatttggagtagtccattttattgatccaaaatttacatcaaaaaaatgtccagtatgcagtaagacaaatgtatacagagacaaagatgatatccttgtatgtaaagagtgtggttttaggtcagattctcaacttaaagagcgtgagaataatattcactatatccacaatggagatgataatggggcgtatcatatcgctttaaaaagtgtagaaaatctaattcaaatgaaataa

SEQ ID NO: 163 - DNA, 3174 bp, Microgenomates sp.
  misc_feature (1)..(3174): MicroCms1 native DNA
atggaaatacaagagttaaagaatttatacgaagtgaaaaaaacggtgaggtttgagttaaagccgagtaagaagaaaatttttgagggtggtgatgttatcaaattgcagaaggattttgaaaaagtacaaaaattctttttggatatttttgtttacaaaaatgagcacacaaagctagaatttaagaaaaaacgagaaatcaaatatacatggctaagaactaatacgaaaaatgaattttataattggagaggaaaaagtgatacaggaaaaaattatgctttaaacaagataggcttcttggcagaagaaattctgcgatggcttaatgagtggcaagaactaacaaaaagtttaaaagacctaacacaaagagaagaacataagcaagaaagaaaaagcgacattgcttttgttttacgaaattttttaaagagacaaaaccttccttttataaaagatttttttaatgctgttattgatattcaaggcaaacaaggaaaagaaagtgacgataaaattagaaaatttagggaagaaataaaagaaatagaaaaaaatctcaacgcttgctccagagaatatctcccgactcagagtaatggagtgcttttgtataaggcaagtttcagctattataccctgaacaaaactccaaaagagtatgaagatttaaaaaaagaaaaagaatcagaattaagcagtgttttacttaaagaaatttatcgaagaaaaaggtttaacaggacaacaaatcagaaagacaccttatttgaatgcacttccgattggttagtaaaaattaaacttggtaaggatatttatgaatggactttagatgaagcctatcaaaaaatgaagatttggaaggcaaatcagaaatcaaattttatagaggcagttgcgggagataagcttacacaccaaaactttagaaaacagttcccgctatttgatgcttctgatgaagattttgaaactttctatcgacttacgaaagcacttgataaaaacccagaaaatgcaaagaaaatagcgcaaaaacgaggaaagttttttaatgctccaaacgaaacagttcaaaccaaaaattatcacgagctttgcgaactctacaagcgcattgctgtaaaacgaggaaagataattgcagaaataaaaggaatagaaaatgaagaggttcagtcccaactcttgactcactgggctgtaattgcagaagaaagagacaaaaaatttattgtattgattccaaggaaaaatgggggaaaactagaaaatcacaaaaatgctcacgcattcttacaagaaaaagatagaaaagaacccaacgatataaaagtttatcattttaaatctcttactttgcggtctttggaaaaactttgctttaaagaagctaaaaacacatttgctccagaaattaagaaagaaacaaaccctaaaatctggtttcctacatataaacaggagtggaatagcacgccagaaagacttatcaaattttacaaacaagttttacaatctaattatgcacaaacatatttagatttggtagattttggaaatctaaatacctttttggagactcatttcacgactttagaagaatttgagtcagaccttgaaaagacatgctatacaaaagtgccagtttactttgctaaaaaagaactcgaaacatttgcagatgaatttgaagcagaagtttttgaaataaccactcgtagtatctcgactgaaagcaagagaaaagaaaatgctcatgcagaaatttggagagatttctggagcagagaaaacgaagaagaaaatcatatcactcgtctcaatccagaggtgagtgttttgtacagagatgaaatcaaagaaaagagtaatacttcaaggaaaaataggaaatcaaatgcaaataataggttttctgaccctcgttttacacttgcaacaaccatcacgctcaatgctgataagaaaaagtcaaaccttgcttttaaaacagtggaggacataaacattcatattgataattttaacaaaaaatttagcaaaaatttttctggcgaatgggtttatggaattgatagagggctaaaagagcttgcgaccttaaatgttgtaaagttttctgatgtaaaaaatgtatttggagtctcgcaaccaaaagaatttgccaaaattcctatttacaaattaagagatgaaaaagcaatcctcaaagacgagaatgggctgagcttgaaaaatgcaaaaggagaagctcgaaaggtcatcgacaatatctcagatgttttagaagaaggaaaagagcccgattcaacactttttgaaaagcgagaagtttcatctatagacctcactcgagcaaagctaataaaggggcatattatttccaatggtgatcaaaaaacatacctcaaattgaaagaaacatcggctaaaagaagaatttttgagcttttttcaaccgctaagattgataaaagttctcagtttcatgtaaggaaaacgattgagctgagtggaacaaaaatatattggctttgtgagtggcagaggcaagattcctggagaactgaaaaagtaagcttaaggaatactctgaaaggatatttacaaaatttggatctaaaaaatcgttttgagaacatagaaacaatagaaaaaataaatcacttgcgagatgcaattaccgcaaatatggtagggattttgtctcacctgcaaaataaattagaaatgcagggagttatagcattggagaatctggatacagtgcgggaacagagcaataaaaaaatgatagatgagcattttgaacaaagtaatgaacatgtctctcgtcgcttggagtgggctctgtattgtaagtttgcaaatacgggagaggtgccaccacagataaaagaatctatcttcttgcgagatgaatttaaggtctgtcaaataggaattttgaattttatagacgtaaaaggcacaagttcaaattgtccgaattgtgatcaggaatcaagaaaaactggtagtcattttatctgcaactttcaaaataattgcatttttagttcaaaagaaaatcgaaacttacttgaacaaaaccttcataattctgatgatgttgccgccttcaacatcgccaaaagggggttggaaatagttaaggtttga

SEQ ID NO: 164 - DNA, 3204 bp, Omnitrophica bacterium
  misc_feature (1)..(3204): ObCms1 native DNA
atgaagaatggtataaatttattcaagacaaaaactacaaaaactaaaggtgttgatatggaaaaatatcagataacaaaaacaattcggtttaaattattgcctgataatgcgcatgaaatagtggaaaaagtaaaaagcttaaaaacatcaaatgttgatgagttaatggatgaggtgaaaaatgttcatttgaaaggtttggagcttttatttgcattgaaaaagtatttctattttgatggcaaccaatgcaaatcgtttaaatcaactttagaaataaaagcacgttggttgcgattgtatactccggatcaatattatttgaaaaaatcatctaaaaatagttatcagcttaaatcgttgagctactttaaagatgtttttaatgattggttattcaattgggaggaatctgtttcagagttagcaataatttatgaaaagtataaaatttgtcaacaccaaagagattctcgtgcagatatcgctttgttaataaagaagctttcaatgaaagagtactttccgtttatttctgatttgattgattgtgtgaatgataagaattcaaataaaacatttttgatgaaattaagtgaagaattgtcagttttacttgagaaatgtaatagtagagctttgccttatcagtcgaatggtatcgttgtcgggaaagccagcttaaattattacacagtctcaaagtccgaaaaaatgcttcaaaacgaatatgaggatgtctgtcaaagtttagataaaaattatgatattacggagatgaaagtaatattatataaagaaaaattggacaatttaaactttaaggatgtaacaattgcaaatgcttataatttactgaaagaaaataaggcattacaaaaacgattgttttctgaatatgtttctcaaggaaaagtgttgagtttgataaaaactgaattgccgttatttagcaatattaatgataatgattttgaaaaatataaagaatggtctaatgaaataaaaaaattggctgataagaagaatacattttgcaaaaagactcagcaagacaaaataaaagatattcaaaacaagataagtgaattgaaaaagaaaagaggagcgctctttcagtataaatttacaagttttcaaaagcattgtgataattacaaaaaagtggctgttcaatatggaaaattaaaagccagaaaaaaagcgattgagaaagatgaaattgaggcgaatttattgcgatattggtcggtgatattggagcaagaagacaaacattctttagttcttattcctaaaaataatgcgaaagatgctaaacaatatattgaaacaattaataccaagggaggaaagtatattatccatcatttagattctctgacattacgagctttgaataagttgtgttttaacgcggtcgatatagagaaaggtcaaatggtaagagaaaacacattttatcaagggataaaagaagagtttgagcgtaataaaataaattgtgataatcaaggtgttttgaaaattcaaggtttatatagctttaaaactgaaggaggacaaatcaatgaaaaggaagctgtcgaattttttaaagaagttttaaaaagtaattatgctcgggaagtattaaatcttccgtatgatttggaaagtaatatttttcaaaaagaatatacgaatcttgatcaattccgacaagaccttgaaaaatgttgttatgctttacattcgaaaattgggaaagatgaccttgatgagtttactagaaggtttgaagcgcaagtgtttgacattacgagtattgatcttaaatccaaaaaagaaaaaacaaaaactactggagaaatgaaaaaacatactcagctttggttggagttttggaaaggagctattgaacaaaatttcgcaactcgtgttaatccggaactatctattttctggcgtgcgccgaaatctagcagagaaaaaaagtatggtaaaggttcggatttatacgatccaaataaaaacaatcggtatctttatgaacaatatactcttgcgttaacaataactgaaaatgctggatctcattttaaagatattgcttttaaagacacttcaaagattaaagaagctattaaagaatttaatatgtctttatctcagtctaaatattgtttcggaattgatcgaggaaatgcggaattggtttcgttgtgcttgataaaaaacgaaaaagattttccttttgaaaagtttcccgtttatcgtttgagagatttgacgtatcaaggcgactttaaggataaacatgaccaaatgcgatatggtgtagctatcaaaaatatttcgtattttatagatcaagaagatttatttgaaaaaaataatctttctgcaatcgatatgacaacggcaaaattgataaaaaataaaattgttttaaatggggatgttttaacttatttaaaattaaaagaagaaactgccaaacataaactgactcaattctttcaaggtagttcaatcaataaaaattccagagtctattttgatgaagatgaaaacgtttttaaaatcacaactaatcgcaatcataatcccgaagaaataatctatttttatagaggggaatatggagcaataaaaaataaaaatgatttggaagatattttaaatgaatatctttgcaaaatggaaactggtgaatctgaaatagttcttttaaatagagtgaatcatttaagagatgcgataagcgcaaatattgttggtattttatcgtatttaattgatctatttcctgaaactattgttgcattggagaatttggctaaagggacgattgatcgacatgtcagtcaaagctatgaaaatattactcgtcgttttgagtgggcgctatatcgaaaattgctgaacaaacagcttgcaccacctgaattgaaagaaaatattcttttaagggagggagatgacaaaatcgatcagtttggaattattcattttgttgaagaaaaaaatactagcaaagattgtcctaattgtcgaaaaactacccaacaaacaaatgataataagtttaaagaaaagaaatttgtttgtaaatcttgtggatttgatacatcaaaagatcgaaaaggaatggattctttgaattctccagatacggttgcagcgtataacgttgctcgtaaaaaatttgaatcataa

SEQ ID NO: 165 - DNA, 3255 bp, Smithella sp. K08D17
  misc_feature (1)..(3255): Sm17Cms1 native DNA
atggaaaaatacaaaattactaaaaccattcgtttcaaattgctgcctgataaaattcaagacataagccgtcaagttgctgttctgcaaaattctacaaacgcagagaagaaaaacaatcttttgagattaatccaaagggggcaggaattaccgaaactattgaatgaatacatccgatacagtgataatcataagctgaaatcaaatgtcactgttcattttagatggttgcgtttgtttacaaaagatttgttttacaattggaagaaagacaatacggaaaagaaaatcaaaatcagcgatgttgattatttgtctcgtgtgtttgaagatttttttaatgaatgggaaacagtaattgaaagaataaatactgattgcaacaggccggaggagtctaagacaagagacgcggaaatcgctttctcaataaaaaaaattgcaaccaagcagatgtttccattcataaaaagttttgtttataatagtaattacaaaaacagcgaagaaacaaaaagcaaactaaccgctttgctaaatgaatttgaaacagtattgaaaatatgcgagcagaactatctgccatctcaatccgcgggcattgtgattgccaaagcgagtttcaactactataccatcaataaaaaacagaaagattacaaaggatacactgatgatattgaaaaaatagagaaaggaatgaattcaaaatttcattatgaaagaaaatatgaccagttgcttgaagaattaaaccttatcgctttaaaagaattaccattaatcgaattttattcgaaaatcaaaagctataaatcaaccagaaaaatcgagttttcagaagctgtttccaaagggttggcgtttgccgatttaaaaagcaagtttcctctgtttcaaactgaatcaaataaatatgctgagtttttagaactgaccggcaggataacgcaaataagtaccgcaaaaagtttgctttcaaaagataatcccgaagctcaaaaacttcgagacgaaattaagaaattaagaataaacaggggtgaatattttaaaaacaattttcataaatatattagcctttgcaatttatataaaaaaatagctgacaaaaaaggcagattaaaaggccaagtcaaggggatagagaacgaaaggattgattcgcaaagaatacagcactgggcgttggtgctggaggacaatttaaaacattctctgattctaataccgaaagagaaagtaactgaggtttacagaaaagtccgggcttcaaaggccgatagtacaagttcaagttcgtcattgtactactttgaatccatgacctatcgcgcattacacaaattgtgttttggtgtaaacggcaatacttttttgccggaaatccagaaagaactgcctgaatataacccaaacaaacaaagtgactttggtgaattctgtttccataaaagcaatactgataaagaaattgatgaacctaaactaatatccttttatcagtctgttttgaaaactaattatgtcaaagacaatctgaacctgcctcaaagtgtatttgatgaagcaaccgtccagacatttgaaacaaggcaggactttcagatagctttagagaaatgctgttatgcaaagaagactatcatttccgaaactttgaaaaaagaaatattagaagacaacaatgtgcaaatatttcaaatcacaagtcttgatttacagaggtcagaacaaaagaacctgaaagcacacacaaagatttggaacagattctggacgaaacaaaatgaaacggctaattatgatctgcgtctgaatcctgaaaccgccattgtctggcgaaaacctaaaaagacaagaatagataaatatggagcaggaacatcattatatgatccgaaaaagcggaacagatacttgcatgagcaatatactctttgtaccacggttacagacaatgctttgaataatgaaattacttttgcctttgaggatacaaagaagaaaggcactgaaatagttaagtataacgaaaaaattaatcagacattaaaaaaagaattcaataaaaatcagttgtggttttacggcattgatgctggcgaaattgaattagcaacgttggccttaatgaataaagacaaagaaccgcaattgtttacagtttacgaacttaaaaaatcggacttcttcaagcatggatacatttataacaaagagcgtgaattggtgatacgcgaaaagccgtataaagcgattcaaaatctatcctattttttaaatgaagagctttatgaaaagacattcagagatggtaagtttcaagaaaccttcaatgaactgtttaaagaaaaacatgtatccgcgatagatttaacgacggcaaaagtgataaatgggaaaatcattttaaatggcgacatgatcacttttttgaatttgaggatattgcacgctaagcggaaaatatatgaggaactgataataaatccgcaagctgaattaaaagaaaacgaaaaagaatattatctgtattttgataaagagggaacagaaaaagttgaaaagatttatcgaagcagattggattttgaacatattaaaccctatcaggaaattagaaatgacctgaatgcctattttaaaaatgttcaaaaaaatgaagcaaaagtggaagatcaaataaatcaaacacgaagagcgcttgtcggaaatatgataggcgtgatttattacttgtatcaaaaatatcggggcattatttctattgaagatttaaaacaaaccaaagttgaatcggacagaaataaatttgagggcaacatcgaacggcctttggaatgggcattgtaccgaaaatttcagcaagagggatatgtgccgccaattagcgaacttattaaattaagagaacttgaaaaatttcctttaaaagatgttaaacagcctaaatatgaaaacatacaacagtttggaattatcaaatttgtaagcccagaagaaacaagtactacttgcccttcttgcgagaaaaaagcttatgaattacaaaaagaaaagaaaggagaagaaaagcccgctgaaaacaaacgatatgaagcggataaaaaggcaggagttttctgctgtccaaaatgcggttttcataacagaaccaatccaatgggatatgaaagtttggatagtaatgataaagttgccgctttcaatattgccaaaagaggatttgaacagaactttcgccaatag

SEQ ID NO: 166 - DNA, 3474 bp, Candidate Division CPR1 bacterium
  misc_feature (1)..(3474): ADurb.160Csm1 gene (native sequence)
atgttaaaaacttttaaaaacttttatgaggtaaggaaaacagctagtttcaagctaattcctaataaaatttatagacaaattgaaatgagtaaagaaccttcaaattttaaagatctgggaaaacaatatgttaatataataaattctttatcagagttattatatgaagatgaacatgaagacaatactgaagaagtatgattgtctacaaacttatgatcacttatatcccaagatgaccaattaaaaattggagaaataacaaaatctgcaaacaaatctgtcgaaaatcacgagcaaataattttacattgagatgaaaaggattttgataaaaaggattttaataagcttgttagaataaaacatcaatggattaaagagaactttagaagtgattggcataaaaataaagaaaacattgtttcttacaaaaccaataaagattgaaacagagttaaaacaaaaaattggactattatttgaaatgtggagtttttacaagttttttttaaagactttttaaaaacagcactagaatattgaaataatattatagagttaaccgaatcacaagaacacgataaaagtagaaatagtgatataaaatttttactacaaaaaattcaatctaagttacacttaaataaaatttatcaattatttgaatgagaatatataaatcataaaaatgataattcagatatcgaatatttaagagagcaacttagagactttaaacaaaaagctaacaattgtatagaaaactataaaattagtgattcgttttgaatgtttatagaacacggaagtcttaattattatacaagaagaaaaacacaaaaagattatgaagaagaaattattaaaaaatcggaatgattaaaaaacaaattttatggaaatttatgagcactttattgaattgataaaaatcaacctatagaaaatctttataaagaaatgaagatttttaaagcaagtcaaaaaagtgcttttttgcagagattacaaagtggtattaattttactaattttcagaaggaatttaaatttattgataatagatgagatgttgttgaaaactttaaaatagttttgttctctgacataacggaagataggtatgaagaaatgttaaatttaaccaatcaaattgaaaaagaaaaaaataaagaatctagaaaacaattaaaagaaaaaagaggaaaatattttcaacatcatcttaacaaatacaaaaaattctgtaatgattataaagatgtggcaatggagttttgaaaaaggaaagcggaaattatatcattacaaagagaaaaggtactcgcagaaagggaaagatgatactgattctttgccaaagattgagaaaacaatttctatataaacacatttgatatagaaaactcacaacaagcttatcatgaactaattaacaataaaaatacaaagtgagaaattgcatattatattctaagctcgataactttgagagcattagaaaagctttgtttctcggaaagatcaacctttagtaaatgaaacataataaataagcttgatgaaaagtttataaaaattcaaaatggaagttgaagaaaaatctttaaaagcaagaaagaactagaagaggagaatatccttattgatttctttgtagaagtactaaaacaccaaactaatttgaacctaaaatttaaatctactcaatctataaacatactaaaagagtgtaaagatatcggtgcatttgagattttattaaaacaagaaacatatatattagatgaatattttatttcaaaacaaaattttgaaagtattttagaaaaatataagtgaatttcatataaaattacctcaaaagacattgagaataacactaataaaagtactttctctagttggtggagagatttttgggaagaagaaaataaagaaaatgattatgtattaagaataaatccagaattcagtatttcttttaggctttgagataaggaaaaatataaaaacacattaccatttcataggaaaaaaaataatcaatattttttaactatgagtttttctcattctgctgatagaaattatattaatactgcctttattaacgaagaagatagaaaacaatcattacaagattttaatgatatttttaatagaaagaatagatttgattatatttatggtatagataagggaacaaaagaattagtgaccttatgaatttttaaaaaatcaaacaaatgattggaatcagtgaatatttctgaaaaaattcctgtctacaaaatcacaaaagattgatttcttcatactaaaacaacgacaaaaaaacaacctaaaaaatgagaacaacctattacaatacacacattagctaaaaatccttccttgtttttagatgaaattgataatccaaaaatctttgaaaaattaagtattacttcttgtttatgagatttaacttatgcaaaacttataaaatgaaaaattattcttaatgcagatatttccaccacccttaatttatacaaaactacagcaaaaaggtctttgcataatgcagttacaacatgaaaaatgatatctaaacaagtattgtatgataatgaagaaaatgttttctattacgagtatgaaaatagaggcattttgaataaagaaaaaaatttgtattggaaagatgaatttaattttttgcctcacaaggatgaatttaattcattaaaagaagaaatagagtttgaattaaatgagtatataaaagatataaattctgaagaagacatatctatgcaaaaaataaataattacaaaaatgctgtctcagctaatattgtatgaatcattacagagttacaaaaatattttgagggatatatctgttatgaaaccttaaatgaacaaacagtcaaaaaggaatttgatacttttataggaaatgttataaacgaaaaaatctataataaattacaattaaatttggaagttccacctattttaaaaaagtttagaactgaagtctgaaataaagatattattcaacattgaaaaatattgtatgttaatgaaaaaaacacttcttctgcatgtcctgtatgtaatgagcaattattaaaaaaagataaaaattgaaatctatctgataagaacgataatgaaatttttaaattatgatgacatttaagtgattttgaaaataacatgaagcatttaacggatctagaatatcaagaacggttaaaaaataaaagttttgaaaaggctaatactaaaaaatgaaaaatagaaaaaaataagtataattcttgaattttaaattgaaaatcttgtgattatcatatgaagaaaaacaattatggatttgattttatagaatcttgagatgatctcgcaacatacaatatcgctaaaaaagccaaagaatatctagaaagtttacctactcctcctcaaccttaa

SEQ ID NO: 167 - DNA, 3894 bp, Unknown
  Metagenome-Derived Sequence
  misc_feature (1)..(3894): AuxCsm1 gene (native sequence)
atgggaaaaaatgaaaacaaataccagttatcaaaaacattacgttttggactaacactaaaagagaagatttcgaataatgagaaaacaccttaccaaagccattctcaattcagagatttaattatcctttcagaaaacagaatcagagaaggtatcagcactccccaaaaccgtgacttaccctcttttatccacagaattcaaaattgcaccgattttatcaatgatttcatccatgattggtggatgattctgatgcacacaggacaaattgaattggacaaagactactataaaagcctaactaaaaaagtgggatttgtaggtttctggtacaaagagaacaaaaaaaagggtggaaaaacgaagcaaccacaagccagaaacataccaatgggtgagcttagacatctttgtccccaaaatactaaggagtgtgccacatacatcaccgattattggaaagatcttttgataacagcaaccaacaaactgtatgaaagcagtgaacaacaaaagaaattcatcaaagcgatggagcagaatcgcacggataacaaacctaacgaaatagatctgaaaaaatcttttttgagtctggtatctgtgacaatggaactgctaaaccctattctaaacgggcagatactattcaacaaaatggacaggctcgatatgtctaaaaaaagcgacaatgatttcattgatttcgtcaatgatcacgaaacggttcgtgaattaaacaatgacattgaagaaataatcgctgatttcaaagaaaacggcaataatgtaaactattgcaaagcgacacttaatccagacacagcattaaagcaacacaacaacaatattccaaatgatatagcaactgatttggaagagctaatgatggacagcatcgtcggaaattatgatgatgtcaactcttttatggataattatgtttcaaatttatctgcaaaagataaaataaaaaaaatcaaagactccaatataagccttatttatcgcgctatcctcttcaaatacaagatgattccggcaaacgtaagaagagatatagcccaaggaatggccaaaaagctcaataaagacgaagagaatatctacagttttctatgcgagtttggcactttgcgtactccacaaaaagactacgctgatctgaaggacaaggacagtttcaatcttgacaactatccattgaaagtggcgtttgatttcgcatgggagggattagcaaaagcttggtatcacgaccaatctgattttcctattgatccatgtcgtgattttctacaagaaaattttgatgtgaacttagaggaagaccaagaagacgaatattttcttctgtatgcagatcttatcgagctaaacgccttattatcaactctcgacaaagggaatcctgcagaccccgactcaataaaaaatgaagcattggagatggtcgaatacataaattggaattcacttgacaaaaaaaatggaaactactacaaaaaaataatcaaaaaccgtctgaaatcttcgaagggcaacgaaacgtacgaaagaataaaaaaagagatttccatgagccgtggacgtcttaagaacaaaatagaaaaatatgacgatctcacttctcaatacaagcgtattgccatggatttaggaaagaaattcgcctctttacgagacaaaattatagctgcgaatgaggataacaaggtgactcactatgcaatgattcttgaggattccaattgcgacaaatatctcttgttgcaaaaagtaagcaataacatttatcattgtatgagttacgattcttcagatcccaaagcttactatgtcgactctatcacatcttctgcaatagcaaagatgatcagaaaggaaacgaatccatccaagataagagagtatgctgaattagaagagaaagaaagagagagacggaacgttgatgattggtgcaggtttataagcaaaaaagaatacgacaggaggtatcagttgaatattaacaatggtttatcttttgaggcactaaaaaaagagatcgattccaagagttatattttggtgaaaaagaacattagtgttgattctatccgtgaacttgttgaaaatgaaggatgccttcttttccctatcgtcaataaagacctcacaaaggaaaggaaaacaacagaagacaatcaattcacaaaagattggaatatgatattctctgggtctgaaaccaattggagattaacccctgaattcagagtgacgtatagaaatccagtaccaggatatcctaatgacaaatttgggtcgaaaagatattcaagattccagatgaacgctcattttgtatgcgattttattccatcctctaattcatacacatccaacagagagcaaatcgccatattcaaagacgagggagaacagaaaaagagagtagaggaatttaatcgcaccctatcaaacatcaatcaaaaattctatgtcattggtattgatagagggcaaaaagagcttgccacactttgtgtcgtcgaccaggataagaaaatacacggagattttaagatctacactcgcaaattcaattccgaaagaaagcaatgggagcattattctctcgaaggagaaaaagggacaagaaacatccttgatctatctaaccttcgtgttgagacgaccattataattgatggcaaaccagaaaggagacaagtgcttgtcgatctgagtgaggtgttggtgaaggataaagaaggaaattacacaaagcccaacaagatgcagatcaaaatgcaacaaatggcttatgttcgaaagcttcagttccaaatgcaggcaaatccaaccgaggttttggaatggtatgagcagaatccaacagaagagttgatcataaagaatctcgtcgacaaagagaacggagaaaagggacttatctctttctacggaacagcacttgtagaactagaccagacacttcccgtctcaaaaataaaagagatgctcgaggaatttaagatactgaagcaaagagaaagcaaaaaggagaatgtgcaaaaagagctgaataaccttacacaacttgaagctgtcgacagtctgaaagcaggaattgtcgcaaacatggttggtgtgatctcatatatcttaaagacactggattataatgcctatatctcactcgaagatttgtctacagtgcaatccagcaccgaatttgcaagtggaatatcaggagcaatcaccaaaatgtcgagagaagaaggaagaagaatagatgtggagaaatatgccggtcttggattgtataatttcttcgagatgcaattgctacgaaaactacaccgcatacaaacagacaacggaaacattcttcatcttgtccctgctttccgtgcccaaaagaattacgaccacatcatggtaggaaaagaaaaaataaagaaccaatttggaatcgtgttctttgtagacgcggcagctacatctatcaaatgcccacgctgtggagcggtcaatgaggataaattcaatccagataaacaaaagtacccagatgcagaaaaagggccaaaattgagaaatcgcaaggagcagtcaggcaaaaaagtatgggtaaccagagacaaggaagacgacgaccgtatcaaatgctattgctgtggattcgacacaaaggaaaagaacgaaggaaatccttttatgtatatcaagagtggcgacgacaatgcagcctatcttatatcagatttaggagttgagtcttacagaaaagcttatgaattagctgcgactgtagtggaagacagaaaaaaaacattaactaacaatttaaatcaaagcaactacaaaattagatttttatggcacactatgtattag

SEQ ID NO: 168 - DNA, 3888 bp, Unknown
  Metagenome-Derived Sequence
  misc_feature (1)..(3888): LAHSCsm1 gene (native sequence)
atgaaaaacattgtaaataactatcagatttcaaaaactttgcgttttgggttaacgcaaaaaacgaaaattcaaaaggaagggtataatggagaaatatatgtaagtcacagagaattggctgatttggttaaaatttcagaagaaagaattaaaaaaagtgtttcttctagtgataagtcaaatcttgagttatcactagataaaattgatatttgtcttaaacaagttggagctttcctatcggattggcagcaagtatattatagaaaagatcaagttgcattggacaaggattactataaaattctttgtaaaaagattgagtttgatggcttttggaaagatgtcaaaggtcaaagaatgcctaattcaaggataataaatatatctgaattagatacaaaggatagcttgggtgttgagagattgcaatatgtattgaattattggaaagacaatttggtcagcgcatctcaaaaatattcggtagtagaggagaaaataaaacgatttaagttggctattaaaataaacaggacagataataagcctgatgaagttgaacttagaaaaatgtttttatctctggcaaatattgtttgtgatacgctccaaccattgtgttatggccaaattagttttccaaaaataaataagttggacgattctagagctgataacaaaaaattaataaaatttgcgacagattataagtctaaaaatgacttgctcactagcattgctgagcaaaagaaatattttgaggaaaatggaggcaatgttccattttgccgggcgaccctaaatcccaagacagctttaaaggaccccaattcaacagataacagcattaaaggtgaaattactcagttaggactagattcaatattaaagagttttaaatcttatttattctttgaaaacagtttggagcatatgtcagcaaaagaaaaaattgatttaatgaagagtagtggagctaatgttgttaaaaaagggcttatgtttaagtacaaaccaattcctgtcatagtacacagagaagttgctcatgagttgagcaaagatttaaataaaaccgaggaatcattaagtgattttttgcgaggtattggacaagctaaaagtcctgcaaaggattatgaagagttgacagataaaaataaatttaatattgaggcatacccaataaaggttgcatttgattttgcttgggagagtttagcaaaggctaaatatcacagtgaaattgatttgccagtagctgcatgtgagaaattcttgaatactttttttgatgtgaaacctaataacgataaattcttgttatacgctaaacttcaagaacttaatgctcttatatctactttggagtatggaaacccttctgatgaacaatccattgtagaaaaaatcaaggctctgtctaatgaaataaaatggggcgattttggcgggagcgggcaggggtacaaaaaatcaatatctgattgggctgacagcaaaaaagattctgacggtttcaaaattgcaaaacaaaaaataggcctttttagagggggattaaggaatgaaatagctgagtattacaacttaacgcaaatatataaaaagactgtaatgcaagagggaaagctatttgcaactatgcgagataagataacaggtgcagccgaacagaataaagttactcattatgcggccattatagaggataaaacaggagataaatatgtgttgttacaagaggtgccattgaataagcaagacagaatttatgacaagatggaccgtaatggagatggatatgttagctattttgttaattctatcacgtcgcgcactattgctaaacaattaaggaaaaagagaatggcggaactaatgaagaataatgcgcgtgggatatataataatgttagtaatattcaacaaccggctctttccgataaagaaaaggaggaaaggaatataaaggaatggataagttttataagtgagaagagatgggattatgagtttaatttgaactttaaaggaaaaaactttgaggaaatcaagaaagaagtagatgctaatggctatgaattagaaaacagaatcttgagcagagacgctcttgaagagttagtaaaaaataagaaatgcttattgttgccaattgttaatcaggatattataaaggagagtaaaacggaaagcaatcaatttactaaagactggaattctatatttgacggtaattctccatggcgtttaactcctgaatttagagtgtcttaccgcaaacctactcctgattatcctatgtctgataaaggagacaagcgttactcgcgtttccaaatgattgcccattttttatgcgattacattcctcaaggtggtagttatgtatcagttagggaacaaatagataattataaggatgataaaaagcaagaaattgctgttaaggatttccatgataggttattgggaaaaactgatgaacaaaaatttatagaggggttaggtgggttgtcaagtttgggtaatgttaccataaaaactaaactcaaaaagcaagatatttctaaagagaaattttatgtttttggaattgacagaggacaaaatgaacttgcaacactttgtgtcattgatcaggataaaaaaatacagggcggtttcagaatatatacaagattatttaataatgagaaaaaacagtgggagcataaattcctggaagagcgcaatattttggatttatcaaatttacgtgtagaaaccactattgttattgatggacaggaaaaaagagagaaagtgttagtggatttaagtgaggtaaaggttaaagacaattcgggaaattatgtaaaacctaataagacacaaataaaactccaacagcttgcatatatccgcaaacttcaatttcaaatgcagacaaacccaggcagagttctagaatggtattctcataatcagaccagtgatttgattattgacaattttgtagataagcaaaacggagaggaaggacttgttccattttttggagctgcagtagcagaattaaaagatactttacctatcgataggatttccgatatgctaaaacagtttgtggaactaaagaacttggagaagcaaggggaagatgtgaagtcaaaaatcgaccagcttattgaacttgaaccagctgataatctaaagtctggtgtggttgcaaatatggttggtgtaattgcatttcttcttaaaaagtatagttataaggtctatatttcattagaagatttgtcaaagccatttaaagaccaaattgttttggggattagcggggtgccaattggtattaagaagggtatggcaggtagaagtattaatgttgaacaatatgcaggtcttggactttataatttttttgaaatgcaattgttaaagaaattattccggatacagcaggatagttctcatatcttgcaccttgtacctgcttttagggctatgaaaaattatgataatgtagcagtaggaaaagggaaaattaagaatcagtttggaatcgtattctttgtggatgctgctgcaacatcaaagacatgtccttgctgtggtgctattaacgatagacaatttgcacctgatttaagaaaattccctaatgctaaaaaaattgagaccccagatggaaagtctgtttggttggaaagggataaaactgacggtaaggatattataaggtgccacgtatgcggatttgatacttcaaaagagtacgatgacaatccacgtaaatacataaaaagtggtgatgataatgcagcttatttgatttctgctgagtgtattaaggcatacgaactagcaacaatactagttgataataaataa

SEQ ID NO: 169 - DNA, 3654 bp, Smithella sp. M82
  misc_feature (1)..(3654): Sm82Csm1 gene (native sequence)
atggaaacaatattataccaacgaacaagatcaatacggtttaaattagaacctattgaagcagaagaaatagaaaaagaaattactgtaatcaaaacccaagacaatgacggcttggtgcaagactgcatattcttggttaataaaggcaatgaacttgcaaataagctaagtaaacttatttgtcgtgattacaactgtgatgaacaaaacaatatctcattaaaacttagaaaagatgtggatgtaaagtatgtttggctgagactttatacaaaaaatgaatattatgattggagtgaacccaataacaaaacaaaaatatattcattagctgaaataccttatttatcagaaaaatttgtgcattggtttgcatcatggaaaagggatttggccatattaaatgaacaaataacaaaaaaaacagaggagcaacacaatttaaacagaagggcagatataggtttgattatacaatcattatccaagcgcaacagttttccctttataaaagagtttatagcagcaatgaatcctaaaaatgcatctaaaatagagatagaagaaatcgtaaaagaaattgatgagctgctgaataagtgcgaaaaaggatttttacccacccaatcatcgggttatccgattgctcgtgcaagtttgaattactatactattttcaagaatccaaaagattttgacaaggaaatattggaattaagcggtgaaaaattctgtaacgacaatcaaaatgaatgcgaaatattgaaagcattttttacgcattgttttgatgtggatgggttttgtggaatgttcttggatgtaaaaaaattagaaaacatctgctcaaagttaaatagcataaagaattatcaagaaaatgataagcaacttatcgcagaagccatagacaataaaattaagctactaaacgaagaaaaagacaatagcaaaaaaaagaaagcaaaaaaaataattgaacaacttgaaaatgataaaaaaatagtgtgcaacttttgggaacttcaggaaaacttttatgttcaagaaagaaattcttccaaaaataataacaataaatactgcctcaataaaaactattttttgatacaacagttatgccaaagcatgaaattattcaaggcaagagaaaaagcaaggtttaacgaagctgtacaaaataataaggacttaccttatggtcagttgaatcagttttttctgttttcagctatacaaatcggtaatgaaaatgacaaaagaaaaactgacaatgaggtgtttgatgattttatgaagcacaataaagagctacatgatatttccgataaaattagcacgcttaaacaaaacaaaaatttggatgaaaaaaataaaaaagaattagataaaatatgtacccagaaagatcaaatagcaaaaagcagaggcaaatattttacagatttagatcataataaaacctatttttccaattatgttaagttctgcaatgtatatagagaagttgctttaaaagctgggcagcttaaagccagaattaaaggcatagaaaaggaaaaaatagaatcccagcgattaaaatattggtcagtaattattgaagagaataaaaagcaatatgtcgcttttattcctaaaagtaatgactatgcaaaaaaagcttatgagaattattcaaaaatatatactaatgataattcaataaacacttgtcagttacattattttgaatcacttacacacagagctttagaaaaactttgtttcagcggtgtacaagaaagaacaaatacctttcaacctgaaataaaaaaggaattatcaatagagaaatttccaaactattacgaaaaaggatatttcattaaaggtgaatattttttcaatgataaaaaaacaggtataaaagatgaatccaaactaatccaattctataaagatgtactaaatacgcaatatgccaaatcagcgcttaaaggcatcccgtgggagcaattaaaaaaaactgttttagatattcagttcgaaaattttgatggattccgccaagctcttgaaaagttcagctatgtaaagcatattaaaacaaagaaagatttattgaatgaattatcaaaagaatatgatgctcaaatatttgaaattacctctttagatttaaaacggcaaatcaaagaggacgcaaatcttaaagaacacacaaaaatatggatggaattttggagcgaaaacaaccaaagtaataattacttgatcagaataaatccgcaattaaccatcacttggcgtgatagcaaagaaagcagagagaaaaaatatggagaagaaacttctttatatgatgtgaataaaaataaccgatttctaaaaccgcaatatacaatttcctttaccattaccgaaaacgccacaacacaaacaatgaacacagcatttaaagatgcgcaaactaaaaaagatcagattcatgagtttaataaacaattattccaatcatatcaacctcaatatttttttggaatagacgtaggaaatatagaattggccaccctgtgtattattaatcctgaaaaagatttgaatgaagaaaagatgtcaaaagaatctttacaatattttgatgtttataagttgaaaaaagaccaatataatttctctaagccctatcacttcaagacgaggaatgaaaccagggaaagaaaagcaatagataatctttcttattttgcaatcgaagaaaattacaaacaaacattcaatgacgataattttgaagcgtgtttttctgatttatttgaaaaaccggttaacacttgtgccattgatcttacaacggcaaaggttttaggtgataagatatttctcaatggcgatatcaaaacttatctttcgttaaaagaacgaaacgcaagaaggaaaatttgtcaaatcattgaaaaacatccgaacgctaaacttctgattaatggaaataaaattttctttcaggaaagtacatcatgtgaaagaacctgcctttgccaagaacctatttattattttaatgataaatatgatagagaagtacaaactttggcagatataaataatagacttgaagattatattaaagataaagataaatccgagctgatagaagagagtaaaataaatcacctcagagccgccattgctgcaaatatgactggcgttatctatcatctttttgaaaaataccagagcttaattgttttggaatatttaacgatttcagatatagcaagtcataaaaaaggcttaaaagcttttgaaggaaacataacacgtccattacaaattgcattatttcgtaaatttttaaaaagcagtcttgttccacctgcattgagtgaaattattcaattgagagaaaaagcaaaggatagaataacaaaaatagggataataaattttattgataaaactgctactagcgtttcttgtccaaattgtcttggtaaatttgaaaattataatgataataagagaaaaggattttgtttatgtcctgattgtggttttgatacaagaactgaccttaaaggatttgaaggcttagacggccccgacaaagttgccgctttcaatattgccaaaagaggatttgaagacttgcaaaagcacaaataa

SEQ ID NO: 170 - DNA, 3447 bp, Lentisphaeria bacterium UBA7640
  misc_feature (1)..(3447): LbCms1 native coding sequence
atgagtaataaaatgacataccaatacacccgcgcaataagatttaaacttaataacccttcaaaaaccggattttatcacccaccagaaaataaaaaagtagacttgaatgatcttctctcaaaaacagactcggttaaaaatgacattaatgacctcctattctttgacggtaaaattcaaaagaagttagaagtaaaaaagaactggttattattgcaccataaaaatgaattcattttttacaccaaaaataacagaagcaaaaagtataaactttctgagcttaacttaaatgcgaatgacgaaaattattttaaaaatcgtcttggtattctactaaatgactggactcattatacctccatattagcagatgcaaacaaccgaccagacgaatcacttattagaaaatctgaaattgccaatgccgttcgctcactattaaacaaacacatattgggatatttaatagacttattgaacaatctttcaagttcaaatgattatcttcttgatggcaaatgtgatgagttaaaaaacaagttgtgttctatcagagaatatctgcaatttttagaaacagagtatttagcaagtcagtcgtctggaattgaatgtgctcgtgccagcttcaactactttaccgttaacaagaaaaataaagaatattttgacaatcagattgacgaaatccaaaaagagcaagcacaaaactatggagaaatcaaagacaacaaactcagtgtcatccaaaggggagatattatttttgattttaaaactgagcaagagaaacaatggttaaagctttatctgggaaaaaatgatataaatgacgaaaaattaacaaaacaacaaacggttactttgctggcaaactttaaatcagaccaaaagtcaattttccatgaagtcttagggcattctcacagtgatgctaaaaatacaatttatacaaacaataatcgtaaactatcaataggaacatcaaatatttcttataagtcaataacgcaagtgagtgatttagagagtcagttttctttatttaacctgaaaggtgataaaaaaacattcgataagttattaaaccctcataaaggaaacaaaaatgtaaaacacttcttttgtggccaaaatccatatttccatcttttcaaaaaatattgcagtaattttgctgacgttgctaaagaaaatgggcaattgacttctcagataaaaaacttggaaaaacaaaggcttgaatcacaacgtgcaacctattgggcaatgatatataagaaagatgaaagtgtaaaattactattgattccacgtatccaaataatggattccagaaaatatattgatagcttaaagcaagctccaaatggcaatctatttgtattgcaatctttaaccatgcgtgcgttggaaaaactttgctttgcggaagaaagtacatttgtaaatgatatggatgccgagttaaaaagtttgcaaaaaaagattaaagaaaccgttacagaaccgacctcgcatgaaaagaaagctggatcagtagataaaatcagagcagaaaaattagccaataaactaatggaaaagttaaaatttttcaagaaagtaataatggcgcaatacactcgtgatagaattgacctgaatcactttgatttatctgcttgccaaacagcagaagatttaaatgcctttgaattagagttggaaaaagcctgttacaagttcacaacctataaattgtcagagcaggaatacgataaatttatccaagattttgacatacaaacatttgacatcacctcttatgatttagaggggcgcaataaatcatcagctccggaaagtgcagaccgtaaattcactaaaatatggaaccaattttggaataatgaatcaaacaatgaatttggaaccgttcgattaaaccctgaattacgaataaactatcgcgaagccgactataacctgaaacagttttttgagaaaaaaggattttctaaaatattcaaacatcgtcgtttgcaagaacagtacaccgtgacgttttcttttgctttgcaagctggaaatatttatgaggatttaagttttgttaagcctgaagaccaaatagataaaataaataagtttaacaatcaattcagagaaaaaatgccttatgattccgcatggaaatatggaattgatgttggtcagattgaattggcgactttatgcttgaccagaaaaacagatcaattttattcggcaaataatgaaatattttgtaaatatgaattcccggaaattgaaatttataaattgaaggatctgaatcataacgagaattatgacaccaaaacggaaacaaacaaaattcgttatgcaattaaaaatatctcatattttattgatcaggtcgaactttttgaaaaatacacgacagcaacgatagacttgtctactgcaaaactgattaaaggaaaaatcgttactaacggggatttgataagttatttaaagctccaaaagcttgttgcaaaaaaacgtgtctatgaaattttccaccgtgaccaaattgattatcaagatactatgtttatcgaattatctgatctaaaatataaccacaatggcagagaaaaaactccaggtgaattgcatgtgagtgttatatttaaagaacaggaaaatacaaaccagaaagaaggtcgaactgttttctcgtttagaaaagagtgggcaaacttgacaggctacactaccgctgacattgaaaatagtttaaaaatatatttatcagatattcaaactttaaccaaacaacgcaagtcggataagcgtcttggaaaagacgtacgtcaagaaaatttgcacacgccaactttcgaacaaattaataatttgaagcaagctcttgtagcgaacatggttggtattatttgtcaccttcaggaaacatatccaggttacatttttttagaggatttaaaaaaagcatcgattgacaatcaatttaaccagaataattcacatattgctcgaaaattggaattttcgctttataagaaacttcaatcccttggcctggttcctccacatataaaagatatagttgcattgcgtgaagttataagaaaaaaagatgacaagttcaactgccagttcggcataatgattttcattaatgaagagaacaccagcaaaacatgtccatattgtcgtaaaaaatcaagaaaagacaatgtaaaaaaaatgcaaaaacatgcttttgattgtgaccctgaaaatgactctgcaagttgtgggtttacgacatgcagtacgaaaaaagaattccaatttttaaaatccattgacaacccagattcattagcagcttttaacattgcgtcaaaaatagatgacaaagatttattaataagattgtctttgcctgtgaggcatggaaaacgatga

SEQ ID NO: 171 - DNA, 3477 bp, Unknown
  Metagenome-Derived Sequence
  misc_feature (1)..(3477): Unk1 Csm1 gene
atggaaaattttaaaaatttgtatgaggtgcgaaagacagttagatttgagttaaaaccgagtagaaaaaaaacttttgcaggaggagacatctttgaattgcagaaagattttgaagaagttcaaaaattttttttggatatttttgtttttgcgattgaacaagaaaaattatatcaggaggaggaagaagaaggaaaattgtcccgatatacaaaaatagaatttaagaaaaaaagagaaataaaatatacatggctgagaatttatacaaaaaatgaattttatgattggaatggaaaaaatgataaagaaaaaaattacgctttaagtaagatagattttttggaaaaagaaattttaagatggtttaatgagtggcaagaattaacagtaaatttgaaaaatttaacacaaacaaaagaacatgaaaaagaaagaaaaagcgatattgcctttgtattgagaaattttttaaagagacagaactttccgtttataaaagatttttttaatgctgttattgatattcaggaaaaacaaggcaatgaaagtgatgagaaaattagaaaatttagagaagaactaagggaaatgaaaaaaaatctcaatacttgtgctaaagaatatctttcatctcaaagtaagggagtgcttttgcataaggcaagtttcaattattatacgctgaacaaaacaccaaaagagtatgagaatttaaaattgcaaaaagagttagaaattgataatattttacctaaaaaaatctgcaagagagttcgttggaataaggaaaagaaacaggaggatattttatttgaatgtaattctgactggttggtagaaattaaacttgggtacgatattcagaaatggactttagatgaagcttatcagaaaatgaagacttggaaggcagatcagaagtcggattttaatgaaaaaattggaaattttattgatcaatatttaaagaaaggatttattgaagatttgatgaatgaaaatgagaaaaaaaacgcagaagcaatattaagagaattttctgttttcaaacctatcgaaaatttttatttttatgattttttagagagaacaaaagaaataaaaatattaagcaatcaaaaaaataatatccttcaaaaatacaataaaaacgcaaaatattttgagaaaataatcacatacaaaataaaggataaagaagatctgacggaagatgaaaaagaatatcaagagttagagaaaagtatagaaaaaaaagcaaaagaacgaggaaaattttttaatgcaccgaaagaaaaagttcaaacacaacattattttgaactatgtgaactttataaacgcattgcaatgaaacgaggaaaaataattgcagaaataaaaggaatagaaaatgaagaagttcaatctcagcttcttactcattgggctttaattgccgaagaaggagaaaaaaaatctgtcgtgtttatcccaaggaaaaatggagaagaattagaaaaccacaaaaaagctcatgaatttttgcaaaaacaagaaaaaaaagaatttggcgatataaaaagttatcatttcaaatctcttaccttgagagctttggagaagctttgttttaaggaaactgaaaatacatttaccccagaaattaaaaaagaaacgaatccaaaagtttggtttccaaaatataaacaagagtggaatgacgaaccgcaaaaacttattaatttttataaacaagttttgcaatcaaaatattcgcaaaaatatttagatttggtagcttttggagatctaaaatcatttttagaaacttcttttgatgatttgcaaatatttgaatcggggcttgaaaaaacttgttatataaaagtgccgatttatttttccaaagaaggatttgaaacttttacaaatagatttgatgctgaagtttttgaaataacaactcgcagtatttcaagtgaaagcaaaagaaaagaaaacgctcatgcagaaatttggaaagatttttggagtaaggaaaatgaagaaaaaaatcacattactcgtctaaatccagaagtaagtgttttttatcgtgatgaaatagaaaaaaagagcaatgctttgcgaggaaataataaatcaaatataaataacaggttttctgcttctcgttttactcttgtaacaacaatcaccattagagcaacgcataaaaaatcaaaccttgcttttaaaacagaggaagatataaaaagccatattgataagttcaacgaagcatttcaaaatttttctggtgaatgggtttatggaattgacaggggactcaaagaactggcgactttgaatgttgtaaaattttctgatgaaaaaaatgaatttggtgttataaagccaaaagagtttgcgaaaattcctgtttacaaattgaaagacgagaaagcaatcctcaaagatgaaaatggaaaagacttaaaaaatgcaaaaggggaagccagaaaagtaattgataatatttcagaagttttggaagagaaaaaagagcctgattcaaatctttttgaaaaacagggagttttatctcaaggaatttcatgtatagatcttacacaagcaaagcttataaaagggcatattattctgaatggtgatcaaaaaacatatctcaagctaaaagaaatatcagctaaacgaagaatttttgagcttttttcaacttctaaaattgataaaaattctgagttaagggttgagaaaactactatcagtattaattccgaagatggaaagagagacttttattggttaacaaaaaatcagatagttaatagtgagacaaaaaaagaaatacaaaaagagcaacaagaaaaattagataatttaaaagtaatctttatagattacctagaaggtttatgtgtaaaaaataaatttgaagacatagaaacaatagaaaaaataaatcatttgcgagatgcgattactgcaaatatggtagggattttgtttcatttgcaaaaagaattcaaaggaattatagctttagaaaacttggatactgtgcgagagcaaagcaataaaaaaatgattgatgagcattttgaacaaagcaatgaagatatttctcgtcgcttggagtgggcgttgtatcgtaagtttgcaaatatgggagaagtgccatcacaaataaaagagtcaatttttttacgagatgaatttaaagtgtatcaaatgggacttttgaagtttgtggaagtaagtggtacaagttcaaattgtccaaattgcgataaagaagtaggaaaaactaatagtcattttgtgtgcaaaggagaaaataattgtgggtttagctcaaaagaaaatagaaatttacttgaacaaaatcttaataattctgacgaagtcgccgcttacaacatcgccaaacgaggcttaaaattaatcaaccaaaaatggaacaatacatccaaatctcaaaactaa

SEQ ID NO: 172 - DNA, 3873 bp, Unknown
  Metagenome-Derived Sequence
  misc_feature (1)..(3873): Unk2 Csm1 gene
atgaacagcatcaagaatgaatatcaactctcaaaaactctgcgttttgggttgacaaaaaagaagaaactattaaaagacgattgtaatgaaataatttatgaaagccatacagaattaaaagagttagtactcatttcagaaaaaaaaattatggaatctgtttatatcaatcaaaaagcaaaactagatttgtcagttgatcaaatagatacgtgtctttcttcaattaaaaattttattgattcatggaaaggcatatatccaagagcagaccaaatagctattgataaagactattacaaaattctatgtaagaaaataacgtttgatggcttttggatagatgaaaagactaaaacaaaaaaacctcaatcacgcactatcttactttctgaacttagcaaaaaagatgcttcaggtaaagaaagaaagcaacatatcttagactattggaagaataatattttttctgcaatagagaaatatgaagttgtgagtagggaactaaaacaatttcaaaaagccttaaagatacaaagaacagacaataaacctaatgaggttgaactaagaaaattatttttatcacttgcaaatattattcttgatattctaaaaccacttgtaaatggtcaaatttgtttcccaaaaattgagaaattagacatttcaaaaaccgataataagaatctaattgactttgcaacaaaccacaaatttcaaagtgatttacttaacgaaattgcagaattacaacattactttgaagaaaatggaagcaatgtgccattttgcagagcaagtctaaatccaaaaactataataaaatcaaagctatcaacagataataacattgataaggaaataaaacaattaggacttgatagaattttaaatgaatatctatctgctccgtactttgataattctattatacatttgtcagctaaagaaaaactcaataaaatagaagataagaaagaaaattatattactcgtggtttgttgttcaaatataagccaattcaaataatgctacatcatgagattgcaaaaacattaagtaaagagattggtaagagcgaggaaaatataatagaattcttgggcaatattggtcaaataaaaagtccagcaaaggattatgaagtgagtaaagaagattttaatataaataattatccgcttaaagttgcttttgattttgcatgggagaatgtagcaagaaatttataccatacggatactcatgctcctattgatgagtgtagaaaattcttagcagataattttgatattaaaatagaggataacaatttaaagttgtatgcaaatttgctggaattaaatgctttattgtcaaccttaaaatatggaaagccaaaagatgagacaagcatcaaacaaaatataaaagatctactaaacaaaatttcatggaatgaaattggtaaaagtggtcaaaaaaataaaacaaatattgaaaattggcttaataataaagacaaaatagacaatcaaaatggaatagaaaatgctaaaaagcagataggtttgtttagaggatccttaaaaaataaagtacctaaatattataaactcacagaaacctacaaagatatttccatgaaaatgggaaaaatatttgctacaatgcgtgataaaataactgatgaagcagaactaaacaaagtttctcattatgcaatgattgttgaagatgacaataaagacaaatatatcttattacaagaatttacagacaagaaggaggagtgtatttattctaaaacgcaaacacacaatagtgattttacgacttattctgtcaattcaataacttcaagtgccattgcaaaaatgattcgtaaagtaaaagctgaagagctaagaaagaatcaatataataaagatactttctcaattgaagaaacaaaagaagaaaaagaaaatcgaatcattaaagaatggaaacaattcttaaaagataagcaatgggactatgaatttaacctggacacaaagaataaaaactttgaagaactaaaaaaagaaatagattccaaatgctataaattaaatatatcctatattgacaaaaaaacaattactgatttggtagaaaacaaaaattgtcttttgttacctattattaaccaagacttgtcaaaagaagaaaaaacacaaaacaatcaattcacaaaggattgggatgctattttctcacaaaatacaccttggagattgactccggaatttagaatttcttatcgtaagcctacacctaattatcctatttctgataaaggagataaacgttattctcgttttcaaatgattggacattttctttgtgattatattccacaaagcaacacgtatatctctaatagagaacaaatagctaattataaagataatgaaaagcaggaacaagctgtccaatgtttccatgataaattattaggcaagacagaaaaagaagcaaaaaatgagaaacttattgctttgcaagcaaaatttggttctataagtagaacaaacataacacaagaaaagaaaaaggagaaattttatgtttttggcattgaccgaggacaaaaagagttggcaacactttgtgtgattgatcaagataagaaaatcatagacgactttgatatttacacccgttcatttaattctaaaacaaaacaatgggatcataccttcttagaaaaacgtgccataatggatttatcaaatttgagagtcgaaacaacaataagcattgatggtaaaacagaaaagaaaaaggttttggttgatttgagtaaagtaaaagtaaaagataaacaagggcattattcaaagccagataagatgcaaataaaaatgcagcaacttgcttatattcgcaaactgcaatttcaaatacaaaccaatccagatgtcgtacttgcttggtattctgataataatactcaagatttaatattagagaactttgtcagaaaagacgacaatgacaacaaaggtcttgtgtctttttatggagcagcagtagaagaattgaaagatacattacccattgaagaaattttgaatatgttaaagcaattcaaggaactaaaagagaaagaaaaagctggtgagaatgtaaaatatgaaatagatagattgatacaattggaacctgtggataacttaaaaactggtgtcgttgctaatatggttggtgtaatagcctttttgttagagaaattcaattatcaagtatatatatcacttgaagatttatcccagccatttgataataaaataaatggtggtattactggtgtacctataaaaacaaataaagagtcaggaagaatggctgatgttgaaaaatatgccggattaggattatataacttctttgaaatgcagttgcttaaaaaactatttcgtattcaacaaaaaagcacaactattttacatttagtccctgcatttagagctcagaaaaattacgatcatgtaacagttggacaagataatataaaggggcaatttggtattgtattctttgtaaatgcaaatgccacatctaagacatgtcctatttgtggtgcaaataacagcgaaaaacctgacaaaaataaatatcctaatgctcataaagaattagcaaaagatggaaaagaagtatggatagaaagggataaatcaaatggcaacgacataataagatgttttgtttgtggttttgatacaacaaaaacatacgaagataatccggctaaattcataaaaagcggtgatgacaacgcagcttatttgatttcagtatcagcaattaaagcctatgagttagcaacaatattagctatagaaaaatataaataa

SEQ ID NO: 173 - DNA, 3276 bp, Unknown
  Metagenome-Derived Sequences
  misc_feature (1)..(3276): Unk3 Csm1 gene
atggcaggtaccccatatactggacatgtagcatgcaaatactgcaaaattacatcgtgggcaacatacgacagaattaaaattaacaaaatcaacatgaatcagagtttcatcaatggacaaaatttttatgagttgagaaaaacgatccggtttgtccttgaccctaaaacattgaaaagaccatacaccccgtcctcagatgaggttaatttggaagaacagctcaataactttattgaaaaatatcaacaaggcatcaacgactttaaatatatagtttactttggaccaaaaaccgccgagacgaaggaactcaataaaaaaatctctatcaaacactcatggcttaggaattacaccaagagtgaattttatagtattaaagataaattgattcagcttgattataatggtaataaggcgtcaattggcaatagcaacctaaagtttttgaatgagtattttgaaaactggattagcgaaaatcaagaatgcgctgacgctctaaaaaattgcattaatgcgcccgcagaaaaacagaagcggaaatcagaagctgctcattgggtaagaaaactgactaagcgaagcaattttgaatgtatctttgaacttttcaatggaaacatcgatcacaaaaatagcaatgatgatatcgaaaagatcaagcattgtttaaatgaatgtaaaacgcttctgacttccttggaaaagatgcttttgccgagtcaatctcttggaatggaaattgaacgagccagtttaaattactacacgattaataaaaaaccaaagaattacgatgaagatattgcccaaaaagccagtgcgcttaatgaagcctaccagtttaaagcagatgataaagcctttttaaacagggttggatttagtgatgatggagtaccgataaatgagcttaaagaagcaatgaaaaaattcaaagcagaccagaaatccaaattctatgaatttgttaatcaaaaaaaaagctattcagatttgaaaaaaaacgatgatttaaaattattaaacgacatttctgaagaagattttaataaattcaaagaaacacaagataaaatgacccgcgggaaacattttcagttttcattcccaaattacaaaaaatctgaaaagaatttttgtgatttatataaaaatgtcgcagtagcttttggtaaaatcagagctgatataaaagcacttgaaaaagaaagaatggatgcggaaaagctgcaatgctgggcggtaattctggaaaaggataatcagcggtatgttgtaaccattccgcgagatgcgaataacaacctcacaaacaccaagcaatacattgataatcttcaaaatgaagaaaatgaccaatggatactatatgcatttgagtctctgactttgagatcgctggataaactttgttttggtttggataaaaatacgtttatccctgcaattaccggagaattatatcaaaagaataattcgttctttgagaaaggccttttgaagagaaaagaccagttttctcaaaacgggacggatttagctgcattctataaaacagtacttgaattggattctacaaagaaaatgctgggaattaataaatacgcggattttaaggcttttatatccaaggaatataccgcattagaagattttgaaaagacactgaaagaaacttgttactttaaaaaaagggtttttatctcagaagacacaaaaaataaactgataaatgactatcagggtaatctttataaaatcacaagttacgacctggaaaaagatgattccgaagcgctgggaacactaataaataaaaaacaatttaatagagcaagtccagaaatacacaccaagacatggctggatttttggacagccgataacgaaactgacaaatatccaatacgactgaatcctgaatttaagattagttttgtagaaaagcaggacaaagacttgaatatgagaaatttgggcctgttaaataaaaaccgaaggttaaaaagtcaattcctgctttcaacaaccattacactgttggcgcatgagaaaaatgccgatttgcattttaaaaaaacagatgaaatacaaacgtttattaacagctacaatcaggaattcaataaaaaaatcaaaccttttgatatttactattatggtttggacagaggacaaaaagagcttttaactcttggcctttttaagttttccgaaaacgaaaaagtatcattcacaaaacaggacggaacagtgggagaatacagcaaaccgaaattcattcctctggatgtctatcaaattagagaaggacaatatttgacaaaaaacaagaaagggcgattagcttataaaagtatcgatcaatttatagatgatgagaaagtaatagaaaaattacccgtcaattcctgtctggatttatcttgtgccaaattagtgaaaggcaaaattattcaaaatggtgatgttgcaacctatcttgaattaaaacgcgtcagtgctttgcgaaaaatttacgaaaacacaaccagaggccagttcaaaacggacagaattggttttaataaagacaaggggtgtttgttcttggatattgaaaataggggaaaattggagaacaacaatctttatttttatgataaccgttttgcggaaattttatcactggattcaataataaaagaattgcaagattattacaatgaagtcaaaaacaagcaaaatatcgaatttatttcaatcgataaaattaaccatttaagagatgccctgtgcgcaaatgctgttggcattcttgctcatttgcaaaaaacacattttggagtaatcgtttttgaagggttggatgcacgtcataagaataaagaaacaactgaatttgcaggtaatcttgccagtagaattgagcggaagattttgcaaaagttggagacactttccttgattcctccgcaacacagacagatcattgatttacaaaactcaaagcaaataaagcagaccggggctgttttatatattgaagagaagggaacaagtgccaattgtccgcattgcgaaaccgcaaatcccgacaaatcagaaaagtggcttgctcataattataaatgcaaaaattccaactgtaattttgatgcaagtgaaatatctaaaagaaaagacctcataggattggataattccgacagcgtcgctacctacaacattgcaaaaagaggccttttggaaatgaatcaaaagatagaacagtctaaagtttaa

SEQ ID NO: 174 - DNA, 3327 bp, Unknown
  Metagenome-Derived Sequence
  misc_feature (1)..(3327): Unk4 Csm1 gene
atggaaaagtttaaaatcacaagaacgattcgttttaaagcaaacccaattagtattaataaacttcaagaccaaacaaagtcattaagtgaaaattccgaagcagatattgttggcattattaataatgctaatcaaattattaatgacttagaggggttaatttttactaatgaagaaaagaataatcttcggaaagatgttacaattcattttcgctggattagacagtatgtcaaaaatgattggtatgcctggaaggaaaaacaaactaataattcaaaacaagcagaaaaaggtaaaagtaaatctgccgaaaaagatcaattgaaatctcctttagcgcaattagctttattaagagataaatttccggatgcccacaaaacatcaaaaacaatccaatcatcaagtccaaatagtaacaaggaaagctcagaaaaaaaacttcctttaggcgatgtacctttcttaaaagaggaatttactttcttctgcaattattggagagaaattgcagaaaagcttaatgaggcctattcaagagaggaacacaatagaatgcgcagggcagatatcgccaaacacttaaatgaattatctaaaagacaaatactgcctttcctttcagattttttggcgaatggcaatgataagaaaaacgatgaaaaaataaagaacttgattgttaaggtaattgaatttaaaaaggacttggaaattgcaaaaaatgcctatctctccgcccagagtagcggcattatgttggctcgtgctagttttaattattatacactaaacaagaagcctaaagatttcgattcagaagagaggagaattatagaaaatatgaatgctaagtattaccagccaggtaatatacctcaaataataaaagatttaaagatagatggtagcttgtctattgaaaagctttatgaggaattaaagagctataaagctgaacagaaagcaaaatttcaggaagctatttcgcagggattaaaatttgaagagttacaagctaaatttccattgtttgaaacgacacaagaaatattcaatgattatgtctcaaagactaatttaataacacaaaaagcaactcaaaaaaataatactcctaagggtagtatggaatttaaacggttgcaagatgagatcaacaagttaaaaagagaaagggggaaaatgttgcaacaaggcaagtttagaaattttaaagctttgaatgaagaatttaaaagggttgcagtaaaaaaaggaaaattaaaagcgcagctaaaaggaattgaaaaagaaagaatagattctcagagattgcaatattgggctctaattggacaagaagaaaataaatacaaattgattctcattcccaaagaaaatgtatcaaaagcctacacagaaatagtaaatcaaaggtggatagatgacagagtctctatgtatttatattattttgaatcctttactttcagggctttgcgaaaactatgctttggtgtaaatggaaacacttttatgccagaaatcaaaaatgaacttccaaaatacaatcaacaggattttggcgagcatatttttaaaacggaagatgggaaaggagatgaaaaggcattggttgaattttatcagcaagttttaaaaacagattttgttttaaaaaatttagccttacctcatcagcaaatggaagaagtaactactactacatttaaagatttgaattcttttaaaattgctttggaaaaaatatgctacaacaaaaaaatggtagcaagccctcgagtattacggaatcttgagcttagttatggtgctgaaatatttgaattaagtagccaggatttattaaaagaacattctacgaatctgaaaaaccacactaaaatatggaacttgttttggagcaaagaaaatgaagaaaagaattttgatacaagattaaatccggaaattggtattttttggcgtgagccaaaagcatcgagaattgaaaaatatggagagggcacagcccattatgacccacagaaaaagaatcgttacctccatccacaatttaccattgctttcagtattaatgaaaatgcattaagcaatgatttgaattatgcttttgaaggttttgaaaaacagaaagaagcaatgatggagttcaatcaaaaaattaataaggaatttaaagatggtatggaacaaaaaaaattaggagcttttggtgtagatacaggtgaagccgaattggctactattggcttgactgataacggtaaaccttttccggtaaaagtgttgaaggttaaatcagataaactaaattattccaaacagggatattttaaagatggcgcaatgagagagaaaccatacaaagccattgataatttaagctactaccttaaaaaagatttgtatgataaaacctttagagatgatcattttgaacagacttttagggaaatatttgaagaaattgaaaccgaaactattgatttaacatcatctaaacttatatgtgaacatatagttgtcaatggagatttacatactcgaagtaaattaaatattctcaatgcgaaacggcaaatcagacaagccttaattaccaatcctaatttagaaattaaatttgaggataataaaattctcatttctgaaacagatgaagaaaggaaaaagataaatccctggaaagccgtctatcataccaatgaagaattagaacaaatcaaatactttgaagcggtaaaagaagaaatagaacagtatttgaaaaaagtgcaggatgattctgctgaagtcttacaaaatattaatcgttttagagaagtggcagcaggaaatatgacaggggttatttttcatctgtacaacaaataccctattcttatagctattgaaaacttggcacaaggcacaatcgaaaaacatagattgcgttacgagggtgtcatggacagaccattggaaagagcattatataggaaattccaatccataggtttaactcctccggtttcggacctaatagctattcgagataatcttactcaaaagaaaaaagataaaatgagccagcttggtgtcttgcaatttgtagatgaacagaataccagtaaaacttgccctcattgtgaaaaaaatgcttacgaaggagaaagaaaaaatctttacctcgaagaaaaaaagaaaggaattttctcttgtgggcattgtggctatcaaaatataaataacccaatgggattgagtttacacagtaatgacgctgttgcagcttttaacatcgccaaaagaggcattaaaaacttaaaaaaatga

SEQ ID NO: 175 - DNA, 3342 bp, Unknown
  Metagenome-Derived Sequence
  misc_feature (1)..(3342): Unk5 Csm1 gene
atggcgggatttgataagttgaaaaatcaatatgaagtcaaaagaacaattcgcttcaatttgactcctgtacatttctcatataaaaaaataagctctgaatcttttgagagcaagctcaaagaatttgtttccgtatatggagatgtaatagattcttttaaaagaatgatgttcatagaagaatacggggaaatctcattaaatagagatattcatgttcgtcatgaatggatgaaaatttatgctaaacaggatttccatttaaataaagaaataatagtcagatatagaaaaaatagaaaaggtgaaaatattaaatcaaatactgatacgtctttagaaaaaacaccttttatatttgatttatttaacaaattcttgatggataatctttcatctgatgattacaaagatggaatacttagtaatttggaggtaataataagagaaccgcttgatgaaaagagtggaaagagcaatctatcatatttactcaataaaattcagaaaagaagtaattttgagttcatttatcagttattcaagaacatgcagagtaaaaaaagtgattttgaaatagaagaatgtaagaaaaagttagacagatgtaaggagctattattatctcttaaccattatttaactcctaaaaattcatcagggttggaagtggagaggactagtcttaattattttactgtaaataaaaagccgaaagattataagggagaaaagaaaagaatatatgataaaaaaaatattcctattaataatagagttctaaacgggaatcaatcaaaatataatgaagtattgaaagaatcaggattttataatagatataataaaaaaaatttctcagattttagtcttgaagaattttataaaaatttaaaggaatttaaggcagaagagaaatctaaattttttgaattaataaattttggtgcatctttaaatagaataaatgaagatatcccactatttgagttatctgatatagaaagaggtaagaataaagaattatcttttgatagtttccaaaaagagactgaaaaaattaagaaattgtctgatgatttaaatggacaattaaatgatactttgaaaaaagaaattaaagaattaaaaattaaaaggggtcgattttttaatgtgaatgatgatgaaaactgtccattccagagatacataacctatacaaagttatatagggatgttgcaatggagtacggacgaattaaagctgatacaaaaaatttggaaaaagaggaaattaatgctgaaagacttgcatcttggtctgtctttgtgaagatagagaatggatatttcttaatgacaataccaaaacataaagacaatcattcttctctctcatctgcatattatgatttaaaggacactaaaagcgtggatggagagtataatatatatataacagaatctctaaccttaagagcattagaaaaattatgttttggattagataagaatacttttgtaaatgaagattttcttgaagagttaaatatgttatctcctgaatatattgttcataaagatggcaagaagagtataaaaagaaaagatgaaatattaaaggaaagcgaattaaaattaattaatttctataagaaagttttgtcgatgataacaacaaaaaaaagaatacttataaatgatttcaaagataattcatgcaaggataattatttatcaggtgatattaaaactcttcgagattttcagattgcattagaaaaaaaatgttttacaagaaaagaggtaagagtatcgaaagattttttgaatgattttagaaataaatatagtgcaaaattgtacaaaataacaagctttgatttggagaaaagaagagaaaatcccgaatcacatacaaatctgtgggagatttattggacacaatcgaatgaaggtggttatacaacaagaataaatccagaaatgagaattaattttatagacaagagggaggaaagtatcaaagacaaaagtggaaatgaggtggaaagaaatagaagaaaggataaagaatttattctttcattaacaatcactgaacataatgataaaccaaagtttgatatggctttcgcagacaaaaagaaagtaattaaaaatattaatgattttaacacaacacttaattccaaattacaagacggcaaactgggaatttactattacggattggatcggggtgaagcagaattagtgactcttggtgcatttaagtttctagatgaaattgtaaaagtagatacaggttgtttgtataacaaacctaaagctgtgaagattgatgtttgggaactgcctgaggataaattaatggaacaagttccatatgagacaaaaagtgggacgatgtattttgatgcatataaaaacatttcaaaatgtgaacatttgttgataaaaaaagagactgaatcttgtatggatttatcgtgtgcaaaagtcattaatgggaaaatagtattgaacggcgatatatccactctaattaatcttaaactagaaaatgcaaagaggagaattaataatcatctttatgattttatgaaagccaaatacaaaaaagatggtaaggtagatattagaattgagtacaaggaaaaaacgaaaaacaagccagaacgatttgacttatatataaataatggagaattcaaggagcttggaatttattatccgaagtttgcaatagagaaaaaaattgcaatgacgcaactcgatcaatatatagtcgaattaagagatataattaataaccagaaaagtgttggattaaatattgaacttgaaaaagttaatcacctccgtgatgcaataagttccaatatcgtaggcatattaaatttcttatataaggatttccctggatttatatcgctggaaaatctcgaaactgatgataaaaatgagaagcttggaaaaagcaaagtgaatttggcgagtagaattgaatataaattacttaataaattcaaaacattaggactcgttccaccaaactataaaatggttatgagcttacaaagtaaaagagatatctctcaattagggatattgaactacattgagacctctggaacaagtagtaattgtcctcattgtgggcaatcaattaatgacaaggagagagaagaaaataagtggaggaatcatcaatttagatgtagccattgtggatttagcagttatgagaatgaagatcataaaggattagatttccttaattcatcagacgacatcgccgcctacaatatcgctaaaagagggcttgaatatataaatagtctaaaaaaataa

SEQ ID NO: 176 - DNA, 3768 bp, Unknown
  Metagenome-Derived Sequence
  misc_feature (1)..(3768): Unk6 Csm1 gene
atgaatcatatctataataactatcaagtatcaaaaactcttcgttttggattgacacaaaaacaaaaaatcagaagacctggttatacaggtgaattgtatgaaagtcataaagtcctaaaagaattggttaaaatttcagaagaaaaagttaaaaacttgatagtccctgcaaaaaatgaagaattactatcttctttagattctgttaagtggactcttacagaaatacgagagtttttagatcaatggcggtatatatataacaaatcaaaccaaatagccttagacaaaagctattacttaattctatccaaaaagttaggatttaatgatgaaaaaaaatctcgagtgattaaaatgatagaaataaaggatgatataaaagaaaaaatcattaattattgggcttttaacttaaatgaatcgaatcaaaaacttttgatggtaaatgaaatggtcaatacacagttaaaagcattagaaataaatagaactgaccataaaatcaatgaaattgaactaaggaaagctttacaatctcttttcaatacagtcttagacattttgaaacctctggtttacagagaaatttcatttataaatttagaaaaaatagaaaaagattctaagaattctttgctagaaaaatttgccactgattttcaaagaaaaatcgatttattagaaaagattagatcgttaaagacacattttagtgaaaatggagggaatgtatctttttgtagggcaacttttaacccaaaaacagcgattaaaaaccctaagtcaaatgataatagtatcttaaaagaaataaagaaacttggaataaaagatattttagaaaacaatgaaaatgttttttattttgaaaaaaagcttgctgaaattacagcgaaagaaaaattagaatatataataaaagatagtgaatcctttttgattcgctcacttttatttaaatatatttctattcctgcttttttacaccatggaattgcaactgaattagctcccattatttctaaagaaaaaaacgatttaataaactttatgatttcaatagggcaaataaaaagtccagcaaaagattatgctgatataccaaataaaaatgatttcaatgtaaatgcttaccccattaaagttgcttttgattatgcttgggaaaccgtagctaaaagccagtatcatcatgacataaatgctcctgtttcaatgtgtaaaacttttttagatgaaaacttcgaaaactgtacaaaaacaaagtattttactttatattctgaccttttagaacttcatactctattatcgaccttagattatggaaatccttcaatggaagactctataatagataaagcaaataaaataattgctaaaatcgacaataaagaacacaaaacaaaagataaagatttagataaagatatagataaatataaagagactattaaaaacagattaaatcataaaaattttaacgataaacaacgctatagtgatgcaaaaaaagagctctctcaatttcgtggtaaactaaaaaatgaaaacgatatttatagaaaattaacagagtcctataaaaaaatagctatgaatactggaaaaatatttgccgaaatgagagataaaataagcaatgcaagtgaacaaaacaagataagccaccacgctttaattatagaagatcataataaggatagatatttgtttttacaagaattcactacagacaaagaaaagcaaatagaatcaatatgtaatgatcaggctgggcaatatattgtttattgggttaattcaatcacctctaaaagtatttcaaaaatgttaagtaaaaaacgaatagagaaattaaagcaaaagaaaattataaataattctataaaaacctccatcctcagtgatgcagaaaaagaagctcgggatataaaagaatgggtgtccttcataaaagagaagggatgggacattgactttaatttagatttacagaataaaaatctagaagaaataaaaaaagaagtcgatgcaaaagcttataaattaaaagaaacacttattagtcagaaaactctatccaatttagtaaaagagggtaattgtttactcttccctattattaataaagatctagtaaaaaaagtaaaaacagaaaaaaatcaattcactaaagattggaattctatttttaagaaggataatctgtggcgcttgactccagagtttagagtttcataccgacaagctacacctggatatcctacatcagatattggaactaaacggtactctaggtttcaaatgacagctcattttttatgtgatttcttgccccaaggaactaaatatatttccaatcgagaacagattgaaaactacaagtcatcagaaaaacaaaaagaagcggtcgaaatttttcaccaacaaattgaaaatgataacaataatgttattagcacacaaagtctaaaccatttggctagacattttggcagtaaaaacattaaaaagaaacataatactatagaaaaaaaattctatgtctttggtattgatagagggcaaaaggagcttgcaactctttgcatcatagatcaagataaaaaaatagaaggaccttttaaaatttatactcgaagttttaatacaaaaacaaagcaatgggagcaccagttttatgaagaaaggtatatcttggatatatctaatctaagagtcgaaaccagtatttctatagatggaaaaccagaccaacaaaaaatacttgtcgatttaagttactataaagaaggagaaaagtttatcaagcttccaaaaatgcaagtcaaactgcaacaattagcttatattcgaaaacttcaatatcaaatgcaaagaaatccggagacggttcttgactggagctataaaaatacagacgataaatctatattagaaaactttgtagataaaccaaacggtgaaaaaggccttgtttctttttatggggcagctgttatagaacttaaagataccctacctcttagtgaaattaaggatatgctcgaaagatttaaagagttaaaaggaaaagaaaaaaatggagaagatgtttcacaacaattaaatgaactcacacaattaaaatctgtagaccactccaagtatggtgtcgtagccaatatggtaggtgtaatagcccatcttttagaaagatatgactataaagcttatatttcattagaagatttaactaaaccttacagtgctattgacggtatcactggacaaaaaaccgacgctaaatcgataagtggcaaacaacaagatgttgaaaaatatgccggtcttggattatacaacttctttgagatacagttactcaaaaaactttttagaattcaaaaagacagccagaacacattgcacttagtccctgcttttagagccacaaaaaactatgaaaatctcatcgctggtgaagataaagttaaaaatcgatttggaattgtctattttgtagacccaaagtcaacttcaataatgtgccctagttgcggaaaaactaataatagtagtaacaaagaaaaaagggttgtacgagacaaaaaaaacggaaatgacataatatactgtgaattctgtggatttgacaccagaaacgattacaaagagaacccactcaaatttataaaaagtggcgatgataacgctgcatatataatatcaacacacacagccaaaaaagcttacgaattagctaaatctattttataa

SEQ ID NO: 177 - DNA, 3768 bp, Unknown
  Metagenome-Derived Sequence
  misc_feature (1)..(3768): Unk7 Csm1 gene
atgagcttagcagcatttaccaatcagtatcaactcagtaagacacttaggtttggttttacacaaaaagagaaagtaagaaaagaaaattttgatggttcgatttatcaaagccatgcggcgcttagagagcttaccattgaatctgagagattaattaagggaaaacttaaatccaataccgatacggcgcttccattagaaaaaataagagcttgtattgaagagataaaacgttatacagacacatggagtaaaatcttcacccgcgacgatcagctcgctctttcaaaagaatactatcgcgtgatggctcgaaaagcccggttcgatgctttttggaaaaattatcgtgatgtaaagcaacctcaaagtcaaattgtcaggctttcttccttaaagagtaagtataatggaaaagaacgtaaagcctatttggtcgattactgggctggtaacctgcaaaccgtcaagcaaaggcttgttgactttgaacccgcaatccgacaatttgaaagtgctctaaaggacaaccgaacggatcgtaagctcaatgaagtggacttcagaaagatgttcctctctatatgcaaattggtcaatgaaacattagtgccactttgtaattcatctctttgtgttcccgacttggaaaaactgttggataatgaagctagccaagaacttcgtgatttcgtaatgatggatatctttcagttgcaggaacagattgaggcgctgaagatatattttggagagaacgggggctacgttccatacggcagaactacgctgaataaatacactgcactgcaaaaacctcatgcttttgacgaagagatagaggcaattttagtaaagcttaaattgtcagatgtcattaataacttaatcaaacaggatgatgtttctgattattttgaaaatgtaaaagacaagattgggcaactatctaacagtagtatgtccgtaatagagtgcgtacagctgttcaagtataagccgatacctgtgtctgttcggtattcgttagtggagtactttcatcgtaaacttggtatagataaggatgaactcggaaccctcttagacaccatagggaagccgaaaagcccagcaaaggattatgctgacttgcaagacaaaggcgatttcaatctctacaaatatccactaaaggtggcgtttgattttacgtgggaaagcctggcaaaagcacaatatcatgaggggctgaattttcccgaggtacaatgtcaaaaatttttagaaaatattttttttgtcaatacttcatgtgaagcttttaagacttacgccctattgctacatttgcgaggattgctcgccaaacttgatcatgaagagcctaatgacagggaggctatcatagacaaagcaatcagtcttatgaatgaagatgcttttccgaaagtacctttacgtgggacaaaaggcgattctgcaaaccaagcgatactttcctggcttcaattatcgaaagaggagcaagtctacaaaaaagagaaaaaagaccagagttataaccaatacgaaaaagctaagaacaaaatcgggctactacgtggtgaacagaagaataagattggtaagtatagagaagttacggaacaatttaaagacttagcgtccaattttggaaaactttttggagcacttcgtgagaaattccaggcgaaaaatgaattaaataaaatcacccattacggtacgattatagaagacaacaaccaagaccggtatgttttattgtatcccttaagtgaagggataatcgatttggataaacttttcgtacatgaggagtcaggaacgttaacgtcgtattatgtcaaatcccttacatcgaaaaccttaaacaagctcataaaaaataaaggtggttttaaagattttcatatggatggccaacagcctgattgggaaagagtgaagaaaaggtggtctgtgtataaagatgataaagcattcttgaaatatgttaagcgatgcctcaacgaatccgaaatggccaaagctcaaaattggggtgaatttggttgggatttttcatcctgcgatagttttgaagaaattgaaagagaggttgataaaaaagggtatagctttaagaatgatcgcaaactatccgaagatacggtcaaacgtctagttaaagaggagaaatgtcttttgcttcccatcattaatcaagatatcattgttgaagaaaccaaattgcgcaatcaattttcgaaagattgggtaaatatttttgatgccgactgcactgaatatcgcctacatcctgaatttgggatgtcatatcgtatgcctacaccaaattatccgaaaccggagcaaaagcgatactccaggtttcagatgatcggttattttcagtgcgaaattgtccctataaaaacagaatacttgtcgaagaaagaacagatcgagatctttaatgatgcagatgcccaaaaagaggccgtcgaaaaatttaatgaaatagtaaatggtagcgtcaaacccaatgattacgtggtaatcggaattgacagaggtctcaagcaattagccacgctatgtgtcttgaataaagacggagcaatacaaggtggttttgaaatctatacccggagctttaatgccgataaaaagcaatgggaacatcgttttatggataaccgggatatactcgacttaagtaatcttcgggtggaaacaacggtggatgggaagaaagtattagtggacttgtcgtcgataaaggttaaagatcaacggggaaattatacccaagacaaccaacaaaaagtaaagttaaagcagttggcttatatccgcaaattgcaatatcagatgcaggttaatccagaaaaagtaaaagcgttcgcagcgcaacatagaactcctcaggatattaaagatcatatgaaggagctcatcactccttacaaagagggaagccactttgctgatttacctttggatcgtattaaatatatgttggaagcattttgtgcttttcacacggaaaatgatcaaaccagtttacgggagttgattgaattggatgcagctgataatttaaagtcaggtatagttggaaacatagtaggggtaatcgcatttctccttaagcgattcagttacaacgcatatatatctatagaaaatctgacgagagcattttataatcagcgagacggattgtctgaaaaggaaattccgagagatcatgattttatggatcaggaaaatctggtccttgctggtttgggaacttatcactatctcgaagtgcaattattgcgaaagttgttcaggattcaatgtgatgcagggatcatcaatttggtgccagcttttcgtagcaatgataactacgaaactaccaggaagctttcgaaaaaacagggggtagaatacgtttgcaaaccgtttggtatcgtccattttgttgatccgatgtacacttccaaaaaatgtccggcctgcggaggcacaactgtacagcgaggcagttttaaggatgatattacttgccaaaatccattatgcggatacggtacttcccttgatataagcgaaaaaatccaaaagttgatttcagctaataaggctggtcaaaatattcatcttatcagtaatggagatgagaacggcgcctaccatatagctctgaagaccttaaagaatctttttggaaatatacaaaatgcgaataatgaaaggaggtatgtgaagagctttagaagcaagtaa

SEQ ID NO: 178 - DNA, 3141 bp, Unknown
  Metagenome-Derived Sequence
  misc_feature (1)..(3141): Unk8 Csm1 gene
atgacacatcaatatgaatttacaagaacaataaaatttaatcttaataataaaaaagacaatgacgccgctcaattaaaaaaatttttttcagatgaacatataaattttcaggaattatttaatgactttgaggggagttttagtgctcttttagatcaatttaaaaaggcggtttatcttaaaagcggcaataacttcggcaataacttaagggtaaaaaatagtttggaaattaaaaaatcatggttaaaacaatatgcgcgcgatgaattttataaaattgatgaaaaacaacgaaaatataataaatttccagcaaatttatttcaatctattttcaatggctggcttaaaagaaatgaatcattgttagagcaatttaaaaagattaatcagatgccgcaagagagccaaataaaaagatcagaaattttaacattattgcaggaaattaaaattactgataattttctttttattaaaaattttgtccaaccgggtatagcaaatgataaaaattctgatagtgatttagaaaatttaaaagaaaaagttgatcaatttgagattttaatgaataaagctatttttgctatggcgccggatttaagccagggggtagaggtgtgccgagcgagcttaagctattatacagtaaacaaagtttctaaacgagattttgacacagaattagaaggcaaaagaaaagaattaaaacagacgtataataaagagttgaatcaacagcttttgcaaacagttggatttttagattatttagaaaatgaatatcaaagtgatatccagcttgtctctattcaagatttatacaaagcgcttaaaaaatttaaagctcaaaaaaaatcagagtttatgcaagctgtgcaacagggaaagcaggcagaagaattaataaaagattttccactgtttaatgtgcagaaagatgtgatgcaaaattttattaatatttcaaataaaatagatgaaaaaaacctacaaaagcaaaaaagtcaaaatgaaaaagaaaaaaaaggattaactgaagaaattagaaaattaagaattaatcgaggaaagtattttcaaaatcggtgggggtttcctaattatgttaatttttgcaataacgtttttagaccagtggcaataaaaattggtaatttaaaagcacaaattagggctattgaacaagaaaaaatagaagctcgcttgctccaatattgggcgcatattcttaaaaaaggcaaccagtattatttattattgatacctaaagagaaaatgcaagaagtaaaagattttttaaataattcaagcccaagccaagaaggagaatatacactttatagttttaattcattgactttaagggcattaaaaaaacttattcgtaaaaatcttggcaaagaacaaacacatcttcaaaatgataataccgcgatagagttgtataaaaaagttttgcaaggtaaatatagcgaattacaaaatcttgattttagcggatttgaagaaaaaatcaaagaaatcgtccaaggaaattataacagtgaagaatattttcgtttaaagcttgaacgagtagcttattgttgttttgagcaaaaaattagccaagaaactatagctcacttacatcgcagttttagtgcgcttttattagaaatctccgcttatgattttgaaagaaatattagtagtaaaatgaaagaacattctaaagtttggcaagaattttggaccgtggaaaataaaaatgaacattttcctatacggattaatcctgaaattcgtattttttatcgtcccaaaagggagcaagaggatcttcaaaaagggaaaaaccgttttgcaaaggatcattttggcgtggcatttacaataacccagaatgctgctcaaaaaaatttagatttagcatttgctaaagaaaaagaaatatctgaagctgtcaaaaaatttaacgaagaaattattggcgaatttattaaagaaaaaggtaatgatttatattactatggtattgataggggacaacaagaattagcaactttatgtgtggtgaaattttctgaaaagcaaggaaaaacaaagcttgccaatggcgagatgcgaaaattcaatattcctgtgcctgttcccataaaattaaaattataccgtattaaagaagattgtctaaatagcgaaaaagaaattattattgaccgatacggcaataaaaaaaatgttaaaatgtttgaaaatccttcttattttatagacgagaaagaaaaatttgaagaaatagaatctacttgttttgatttaaccacggcaaagcttattaaagacaaaatagttttgaatggcgatgtacggacatatattgaacttaaaaaagctaatgggaagcggcaactttttgaaaaattgtcaaaaattgaagataaagcagaaattgaattttgcgaagacgaaaacggaaaaagatttcagataaagtcaaaaacaaccgaaataaataaatatcaatatatcattttttattcgcccgaagatgaaaaaataatgccacgtgatgaaatgaaaaaatatctacaaaattatcttaataatttgcgcaacggaaatttagccaaagaaaatattagtattgaaaagattaaccatttaagagatgcaattactgctaatatggtggggattattgcgtatttatttttatttaaaaaatatcagggaattattaatcttgaaaatttgattgaaacacattttagtcaaaataatgaaaatatagagcgccggttagagtggagtttatataaaaaatttcaaaaatttggattagtgcctccccaattacgtcaaacagtgtttttacgcaaagagaataaccaattaaatcagataggaattattcattttgtttcaaagaaaaatacgagtgcttgttgtcctcgttgtggcaatattgtgccaatgaggaaaagagaaacagataaatttaaataccatacttttatttgcgataaatgtggttttaacacccaaaatccaaaatcaccttttgattttattaaaaattcagacgaggtggcggcatataatattgctaaatccaacttaaataagttttattataatggatga

SEQ ID NO: 179 - DNA, 3345 bp, Unknown
  Metagenome-Derived Sequence
  misc_feature (1)..(3345): Unk9 Csm1 gene
atgctacaaaaaggtacatctaagatgctaattcaatttaaaaatcattattcctataacaaatcaataagattcaaattagagcataaaaatggcaagcttccgaaacttgagtctgataatgtagacttaaataaacttgttgacattggcaattctctaaaagatattttcgaagaactagtttatactaaaaataattataataaacttaatagtttagtctcgatcaaaaagcaatggctaaaaatatatttcaaaaatgagttttactctaatgggaaaatccaaaactattccctctcaaattttagttaccttccaaacaagctaattgagtggttaaataattggcaaaataatttaaaggcactcatagaattaacaaaacaacaagattttaataaaactaaaaaaagcgaaattgcgtatattctttcattatttaacggcaagtattctttttcatttgttaaggattttagcacttgtataaatcataaaaattcgcaggaacaaatactgaaacttcaaggagtagttgaaaattttgaaaaagtattaaatttatgcattcaagaatatttgccctctaaaagtgcaggtgttgtaatcgctcaaggtagcatgaactattatgctataaataaagagccaaaaaggtatgataacattcttgctgatttgaaccaaaagtttgaagagctagataaagaatatattgcaatgaaacagtataaatcttctcaaaagtcacgtttgtttgaatttattcgtaaaggattcagtaaagatcaaattttgagtgaatttaaaaaaaaagaaaataatgaagtaagttttgtgtacaataaccaaattataataaggatatatacacaagaattatttaaagacagttattgtttaggtgaagtaattaaattaaccaaaaagattgaagaattaaatgagtcaaaagatagtaataacaaccttcctgaagaaacaaaaaaagaaataacaaagctaaagaaagaaataggtttctattttataagaaggacaagaggaaaatcacataataactatttcaaatcttattatggtttttgcaacgataaatttaaaaagaaagctcaggaaagaggtagattattaacgaaaataaaagcaatcagaaaggaaaaaattgaaagccaaaatttaaggtattggtcactaatcctagatgatggaaaagataagttcttatggttagttcccaaagaaaatatgcaagaattcaggcgagaattgagcaaaattcacccttctggggaatcttctttgttcttatttcattctttaacgatgagggcattacataaactatgttttgcacaagaaagtgactttgtcaaggaaatgccaaaggttctaaaggaagagcaactaaactgcgaaaaagcaagtaatgatactgaaaccaataaaaggatcaaaagaaattttggtttaaattatataaaaactaaagatgaattaaccctctcttttttgaaaaaactaataatcagtgagtatgcacatgagcgtttggacttaaatcattttgatcttagtaagttgcaagttgctactaccttaaacgaattcgaagaatatcttgaagacgcttgttattatttagaaaaaatcagtatatctagttcgatgataaaagagttgcttgaagaatacaacattctaaactttaggataacttcctatgacctggaaaaaagaaataaaaacacctatcaaactcctgaaagcgatattaaaaggcatactaaagaaatctggaataaattttgggagggcgatagatttattagattgaatccagaaatcaaaataagatataggcaaaaaaatcaaaatattgaggattatctaaaagaaaaaggatttgatttgacaaaaataaaaaatagatttttacaagagcaatattcagttagcttcacttttgctcttaatgcgggcaaaaaataccctaaacttgcatttgtcaaaactgaagaaatacttgaaaaaattgaagaatttaatgatgagttcaataaacaatattttgataactcctataaatacgggattgatagggggaatattgaattagctactctatgcattacaaaatttaacaaaaatgacacatatgagtataaaggcaaaaaatatttaaaacctaattttccaacaagtcaagaagatataaaaacttatgaactaaagaacgagtggtataaaaggacagccatttctaatattgaaaccaaacctaaaaataaaaaaacgccgaaacggattattgctaatatttcttatttcattgataatgttgaaaatgaagaatggtttaataaaaaaacgtgtacttctatagatttaacaactgcgaaggtaataaaaggaaagttaattttaaacggcgatgttttaacatttttgaaactcaagaaggaggcagcaaaaagaattctctttgaattagttgcacaaaataaattaacggcaaaaaataaagaattaaaatggaaaagtgatgatggcaataattcagattcagtaaggttgatttgtgatgttttggataatgaaacaaatagtatttatttttatgaagatagtaaatacggaaggggttttgaagggttattaacaactgataaaacagcatattctaaagagggaattagaataaatctgcagaactacttaaatcatctgattagtgaaaaagaaaataaaagtaacaaagcatacagtcatgttccttccattgaaaaaataaatcatctccgagacgcacttgtagccaatatggttggcgttatttcttacttgcaagcatattatccgggaatagtcgttttagaagatttgaatcataaattattgataaaacactttgaagatttgaatataaacatttcaaatagatttgaacatgcgttaattgaaaagtttcaaactttgggtatggttccaccacatataaaagattatcttgagataagaagtagctttagaatgagtaggaacgattcttcccaatttggagcattaatctttgtcagtaaagagggaacaagtaaggaatgtccttactgtgaaaaaaaatggaattggggaaaggaaaaagagattgaactaaaattctcaaaaaagcaatacatatgtggtaaggaaaattcttgtggttttgacactaaacatattcagaatacttttgaattcttgtctgagattaatgaccctgataaaattgcggcttataacattgcaaagagaggatttaagagttttattaataagtctagcataaaaaaacaataa

SEQ ID NO: 180 - DNA, 3102 bp, Unknown
  Metagenome-Derived Sequence
  misc_feature (1)..(3102): Unk10 Csm1 gene
atggaaaattcaaatttatatcaagtcgttaaaacgattcggtttaaactagagccagttggaaagatggacacgcctaaatttggcgacaaaaacgcagagtcaaaggcaaatttgaccccgtttattgagcttgttaaaaagacgatgacaaacgtcaaagctttggtttttagcaagcaagacggcgaggacggtgaaaaatggcgtaaaattttggaggtaaattatagatttttacggagctatcttaaaaattcgttttacgaaaacagaggcgattcgcaagaaaaatcaaaaaaacataaaatttctgatttggagtatttgcaaaaggcgttagaaaatctttttgcggagtttgacgaaattttagacggattagaagattttgaaaaacgcaacacaaaaaaccaatacgaaaaacagcgccacgcacaagcgggacttttgctaaaccgcctttgtaagcgaagtaactttgggtttttaaaagcctttgtgggagcacttgcgcagactaacaagcctttttttgacgataaaacagataaactaaaaaagcagatagacaaatttgaaacagagctagaaaaacaaaaagaatttttcttgccataccaaagcaacggcgttctttttgctggcggttcgtttaaccgctacgccataaacaaaacgccaaaaatgcttgacaaggagctgagagaagagcagacaaatttaaaaaagagtctttgtgagcacaaaattaaaatcgatacactcaacactcttggtttaaaaaacgactgtccttgcacgagtttagacaactcttacacgtttatcaaagactacaaagctaagcaaaagtcaaaatttatcgagcttgtccaaaagggcgaatttgatgaggcaaaaaaggtaaatttgtttgagtgtagcgaaacggattttgaaacatttaaaactcgaacaaagcagattcaaaacgaaaaagacaaagacgagcgaacaaagctaaagcaaaagcgaggagaattttttaagtctcaaaagcgaggaaaattttttaagtctcaaacgcaaaactacgaaaatctttgcgacttatacaaaaaaatagcccaaaaacgagggcagatagtggctaaaatttgtgccattaaaaaagaaaaagagatgtgcgagcaggtgaagtattggtgcgtggcactagaaaaaggcggcgagttttatctttatatgtttttgcgagatgaaaacgataacatcaaaaacgcttacgactttgtctctaaacttcaaacgcaaaaaagtggtgaaacaaaacttcactactttgactctttaacgctaaaagcagttagaaagctttgttttaaagagacggatggcagttttaaaaaagcgctcaaaaatgtaaaatttccagagtgcgagcaaaatctagacgaaaaagtgaaaatttctttttaccaaaatgtcttaaaaaatgccaaaacgctaaatttgtctaaatttgaaaatttacagagcgtaacggagggcaaatttgagtcattgagtgaattcgaagtggcgctaaacatggtttgttacacaaagaccgtttgtgtttcagagagcgtagaaaaagagcttaaaaaattcaaaccgcttgtttttcacataacttcgcaagatttggcggcaaaaagagagaaaaaagcgcacacgcaaatttggcatgagttttggcgtgagagtaacgaaaaaagtaagtttccgttacggctgaatcctgaactgaaagttatgtggcgtgaggcgcgtccgagcagagtcgaaaaatacgccgaacaaagcgacaaatttgaccctaacaaaaagaatcgttacttgcatccgcagtttacacttgcgttaaactttacgcaaaacgctcacaacgaagcgataaatttggcttttaaagatgtacaaaacaaaggcgaagcggtgaaaaagtttaacgagaattttaaaagtagcgaatacgcttttggcatcgatgtgggcacgaaagatttggctttgctttgtttgatagacaaaaacaaaaaaccagtaaattttgacgtttatgaaatttgcaacgagaatgaaatttgcaacgagaagttaggttttgaaaaatttggtttttacaaagatggcacacggcgagacgagccatacaaactcataaagaatccatcgtattttttaaacgagtctttgtataaaaagacctttaacgctacgaaagaggagtttgaaaggagttttagcgagctttttaagcgcaaaagcgtttgtgcgctggacttgactacggcaaaagtcatctgcggaaagataattttaaacggcgactttagcacgcacctaaatttaaaaattttaaacgcaaagcggaaaatttcggctaagctgaaaaaagatccaacgcttaaaattgaatacgacaatgacgacaatattttgtttggtagcaatgtgattttttattataacaataagtatgaaatagttcgaccatacgatgagataaaaaacgaaattttcgaatttcacgaaaaacaaagacttgacgatgcaaggctagaagataacataaacaaaacgcgtgcgaatcttgtggcaaatatggtgggcgtgattagctttttgcataaagaattttctggttttgttgtgctggaaaatttaaaacagagcgagatagagggaaatcataggcttaaatttgaaggcgacattacgcgtccgcttgagctagcactttaccgcaaatttcaaagtaagtgtttaacgccgccgataagtgagcttattaaactaagagaaggtgaaaaaaatgaaaacgttgaaagtgatttgattttgcagtttggtattattaaatttgtagataaagacaaaacaagtcgtttgtgtccagcgtgtggcaaagatgcgtatgaaaataataattccaaatataagacagataaaaaagacggagtttttgaatgcgctggatgcggttttaacaacaaaaacaacgctggcgactttgccgcgctagacacaaacgacaagatagcgacgtttaacatcgcaaaaagaggcttgtaa

SEQ ID NO: 181 - DNA, 3705 bp, Unknown
  Metagenome-Derived Sequence
  misc_feature (1)..(3705): Unk11 Csm1 gene
atggaaaagaacgaaatagcaattagtgaatatcaaacacaaaaaaccattagatttggtttgaccgccacaaatcaaaatctgtattccgaagaaatcatgaaattattggatatttcagaaaaaagagtagaaaaacaagctgaacaagcaaaaaaagtaaataatgatgccgataaaaacaatcaattaagatgttgtttggatcaaataaaagagtatctgaaaacttggagtaatatttatccacaaattgattttttggcaattacaaaagatttttacaaggtaatttcaaaaaaagcaaggtttgattttgataaaggaaacggttctgaaataaaattatcctacttacaatcaacttattacaacaagaaacgctatctatatattatagagtcttggaaggaaaatttgcggaaaacagaaaatttatatcggaagtcagatgatttgctgaaagtatttgaagaagccaaaaatcaaaaccgtgacgataaaaaactgaataaagtggaattgcgaaaaacttttttaagtttgtttaatcttgtaaatgagagtctgaaaccattaatcgaaggtaatctgtttattgtaaatgacgacaaaattgacgaacaaaatccaaagcatgattgtgtatccgttttcatttcaaaaacagaagaaagaaggaaattatatgattatatctgtgatttgcaggattatttcaaagacaatggaggctatgtgccattgggtagagtcacattaaataaatggactgctttacaaaaatctaataatagagatgcggaaatcaatagaattattaaggaattaaagattaatagtgtttccatacaaaatattgagtatgaatacaataattttgctaataattttaaagaaaagaaagacgaaaatggtaaaattgtcaaaaacaatgcagggaatattatatgggatttaaaagcagatgcaaaatctgttatcgaaatctgtcagtttttcaagtataagcaagtgccaataaacgcccgcttaaatcttgcaaaaaggttggagaaaagtatcgactttttaagtgaatttggagtttctaaatcacccgcattggattacaaaaatgacaaaaacaactttaaccttacgaattatccgttaaaaattgcctttgattacgcttgggaaaattgcgcaaaagccaaacacgaagagattccttttccgaaagagcaatgtgaaaagtatttgaaagatgtttttgatatagatattgaatgtaaagaaaagtgccaaaacaaagaatgtaaaggttgcgaaaaatgcagaggatattatttaaacaaatatgcagatttaatacgattcaaaattttactcggaagattgaaagcggaatttcataaaacagacgaagaaaaaaataaaagcaacatacaagaattgagaaatatttttagagacttagattatcgtggtgacaaaagattaaataaaaatgaaattcaaaaagcagtcaatgcttggtttgacaacaaagaacaaagtattgggagaaagaaagaagacgaaatacatttaatggagaacgaaaaaaacaaattttccttatccatgcaaattatcggtcaggagagaggcggattaaaaagtagaatttcaaaatacaaagcattaactgaaatgtttaaagtttgtgcttcaaaatttggaaaacaatttgccgatttgcgagattatttcaatgaagcgtatgaggttgataaaattaaatatcgtgcctggattattgaagatgaaaaacaaaaccgtttcattttatttgtaaataaagaaaaagaggttgatctaacttcagaagaaggtgatttatatttttatgaagtaaaaagtttgacatccaaatctcttgtaaagtttataaaaaacagaggcgcttatccggattttcataaaatcaacaatcgtcaaatagacttaaattcaggcgaaaaagatagtcgtggtaattttattgacgatgtaaaaatacattggagtacctataaaaacaatcaaaagtttttagataagttaaaagattgtttgcaaaattcgacaatggctactgtccaaaagtggagtgagtttgagtttgagtttgatttttcaaattgtgatacttacgaaaagttagaaaaagaaattgatagaaaaggacataaacttgaacgaaaaacaatttcgctaactactattacaaacttggttgaaaacacagcatgtttattacttcctattgtaaatcaagatcttaataaaggaaacaaacaagcaaaaaatcaaaaccaatttacaaaagattggtttgatatttttgaaaataaaaagcgtttacatcctgaatttaacatattctatcgcttcaagacaaaagattatccgaatacaaaatttaaaaatggaacagaaaaaacaaaacgttattctcgtttccaaatgctggctcattttggctgtgaagttattcctcaaggcgattatttaagcaaaaaagaacagattgccatttttaacgatgataaaaaacaaacagaagaggtgaaaaaatataacaaaaatatttcttcggatgttgattatgtgataggaattgataggggaataaagcaactggcaacactttgcgttttagataaaaatggagtaattcaaggcggtttccaactttttacacggacttttaactcagaaacaaaacaatgggaacaccaagaattagaaaaacgcaatatcttagatttatccaatttgcgggttgaaacaacaattacaggtgaaaaagtgttggttgatttagcaagtattcaaaccaaaaacggcgaaaaccggcagaaaatcaaactaaaagagttggcttatattcgtgatttacaatatactatgcaaacaagagcaagcgatttgttggattttgcaagcaaaataaattctgctgacgatataacagaaaataatattaaaaactttatttcgccatacaaagaaggggaaaagtatgccgatttaccccaaaaagagatgtttgatttgcttacagaatggaaaaatgcagaggaggaaggaaagcgaaaaattgccgaacttgaccctgctgacaatttgaagtcagggattgttgccaatatggttggagttgttgcattgctttgtgcaaaatataaatacagagttcgcattgctttggaagacctaacaagagcgtatggcatccaaaaagatgcattaagcggagcaacaatttttcaaaatgacgaagattttaaggagcaagaaaatcgcaggcttgccggcgtaggaacaatgcaattttttgaagtacaacttttaaaaaaaatatttaaagtacaaattgacaaagacttacatcttattcccgcatttcgcagcatagccaattacgaaaaaattgttcgtagagacaaacagaatagcggcgatgaatttgtcaattatccttttggaattgtgtgttttgttgtcccaaaatatacttcaaaaaggtgtccgaaatgtgagaaaacaaatgtcaatagaaaggaaaatattgttatttgtaaagaatgcggctttcaaaccaaagaaggaaatccttacgaaaaaaataatattcattttattacagacggagaccaaaatggagcgtatcacattgcaaaaaaagcattgtaa

SEQ ID NO: 182 - DNA, 2721 bp, Unknown
  Metagenome-Derived Sequence
  misc_feature (1)..(2721): Unk14 Csm1 gene; TGA codes for Gly
atggagaaaaattataagagtgaaatcaatttatcttatgaagacattctaaataaatttaatttattatgaagagctattgatatcgcaaatgattttaaaaattccaataatcaaaataacttttctcttgatgaatatcctataaagttagcctttgattatgcttgggaaaatacagcaagaagcttgaaaagaactatacctttccccaaagaggtatgtaaacaatttttaaaagataattttgatgttgatatcgataatgcagattttaaattatatgccaatcttttattcatagcggataacctagcaactatagaatataataacccaaataatgaagtagaacttataaatgaaataaaacaagcatttgaatgcattagctttccttttgataaagaagtatataaatgacataaagaagctattttggaattattagataaagaaaaatctcaaagagactattccactatattaaaagcaaaacaagaattgtgattattgagatgatgattgaaaaataagattaaaaaatacagagatttaacacagagattaatagacaaaaagaattcacatttttgaatcgcgagttttgtgggaaaaacacttgctacaataagagatggtttaaaggaagaaaatgaactaaataaaattagtgattactgagtaattattgaggatagtaatcaagataaatatctacttactctagagctaaatgggaaagatataagagatagaattagaaatagcctatgaaactgagaatataagacatatgaagtaaattcctttacttcaaaagcattaaataaatttatcaaaaatcctttatcagaagacgcaaaaaaatttcatgggaaatataaggatgaatatagtttttgatatgaaaataaagattgagatttcacttataaaataacaaaagtttcaaaatatgatgaacaaggaaaatggacatgataccaggaaagttttttaagtcatataaaaaagtgtttaattgactctgagatttcaagagaacaaaattgggaagcctttggttggaattttgctggttgtaatacttatgaagagatagaaaaagaagttgattctaaatgatatcagttgactgaaaaccttatttcaatggggaatttaaaaagcttggtaaaagatgaaggttgcttgttatttcctattattaatcaagatatttcaagtcaaaaacaagaaaataaaaacatttttactttagaccttgaaaaggtatttgagtgaaaagaatgtaggattcatccagaattttctatcttttatagaaggccaatagaagaacacaagaaggagaataaatcatgaatcataaatcgttttggaaggttacaattattggcaaatcttggtatagaatttgttccaagaaatccttcttttaaaacaaagaaagaacaaaatagaattgcgattgatcaaaagaagcaaaatcagttagtgcaagagtttaaccaaaaaaaagtaaatacatattttgaaggattagataattattatatttttgggatagatagatgaatcaaacaactagcaactttgtgtgttactgataaagattgagttatacaagattttgatatttatacaaagcactttaatagtgaaagtaaaaaatgggaatacaaatttcatagaaaagattgaatattagatttaactaaccttaagattgagtctgatagaagttgaaataaatacatagtagatatatctttatttcaagctaaagatgaagattgaaatcctacaggtacaaataaacaaaatatccaacttaagcaacttgcatatatcagaaaattacaatatcaaatgtctgcaaatgaagaatgagttttaaattttttgggaaaatataagaacaaagaagaaagagaacaaaatatggaagaactaattactccatataaagaatgaaaaaattttgcagatttaccaatggatatttttcaagaaatgtttgaaaattattatagattaaaaactgatcaaaatttgtctgaatctgagaagaaaaatcttatgaagatcactacagagcttgatgcaagtgaaagcttgaaaaaatgagtagtcgcaaatatgataggagtgatttattatttgatgaaaaaatatgaatataaagtgaagatttctcttgaaaatctttcaaatgcttggcttttttcaaaagacggactttcttgagatgttgtgctaaatacgaaaaatgatgaaacaatggatttaaagaaacaagataatctagcgcttgcttgagtttgaacatatcatttctttgagatgcaattattgaataagttatttaaaatttctaccgaagaatgagttttgcatttagtcccaagtttttgaagtgtaaaaaattatatagagattatgaagataaaaggaaaatatgtatacaaacaatttggcattgtttatttcgttgatccaagaaatacaagtaaaaaatgtcctgtttgttgaaagtgatgaaaaaaatatatctcaagagttgacaatgttgtaacatgtaagaattgttgatttgatacatcatcagacaattccatccttataaataattataaaaaacaatgaaaaaatattcattttataaaaaatggagatgataatgcagcttacaatatctgagagaaaatacgttaa

SEQ ID NO: 183 - DNA, 3516 bp, Unknown
  Metagenome-Derived Sequence
  misc_feature (1)..(3516): Unk15 Csm1 gene
atggaaaatgcaacaataaaaaatccaaaatacagttatatgaaaagtataaggttcaacctaatagatactgacaacaaattatctgatttaaaatcaaatagtaatcaagatagtataattaatttggacaatattttcagttcatatgataaattaatcaaagagttcaaatcacttttttttgaagttgacaaaaataaagattacaaaagaaataactctgaaaattatattcttaaaagaacaatcaaaattaagaagcaatggttcaaaacatattttaaggaaggatggaacttcaaggaagaaaaaaaacaagagatcgaaaaaacccaaacaaaaataaatgaaactgtctctaaatttgagaatctatgcaaacaactgagaactgatattgatcatgataaaaacagggcacataaaaagcatagaaattctaatttctcatcgattcttcaacaaatcaaaaacaaggatgtattctatttattaaacgatttagttaaacagtcgataaataaaaatgaagtctctaaagttaattcattaataaaagacttcagttcctttgaaaaaaaattaaatcaactatcaaaagaatatttagcttctcagagcttaggaatcgaactatatcgaagttcttttaattattacaccttgaataagtcttcaaaacattatctaaaacaaattgaaaaaaagattcaaaactataaagatgagaaaaataaaacacatattgaatttcaaaacaattcaattaaagtaaatgatatgaaattgcaacttacttcaaaagatttagaagtaatggaaaatataaaaagtgaactaaaaatcaagtttccactaaatcttgaagaaagtaaatatttcatgaaattattcaaagcaaaattaaaatccgatttgttcaaagattgtcaaaaaaataatgaaattaaggattattcttgtttatttaatgagaataaaaaattaaaaaaaatatttgatttgacaagagaaatacaaaatgaaaatgaatttaaagaaatacaaaatttaaagaaagacagaggggaaattttaaagtcattcgaaaattggaaaaactttatcaattcatacagaaaaatttctcaagattacggaagaataaaaacaaatattgctaactatgaaaaagagaaaattgattcacaaaaattgaggtattggaacttattcttaaaaaaagataatcaaatatatattctgttcgttccaattgaattcagacaagatgtcaaagagaagatcacaaatgcaaataccgttaactcaccaaataaaatatttatgattaaatctctaacaaaaagagcgttacataaactttgttttaatgagtatggtagttttttaaacgaaatgaaaaagaaaaagaaagaaacatataatgaaatcataaaatttaaacaaaaattcagagaagaatttgagcaaaataaaattgaaaaattaaatcaagaactaatacaagagctaaaaaagaaaaaaataaagtttgaaaatgatgagttaaagagatctaaaaattttgttggttttatgaagaattttgaaaataaaaaatatggtcaattcaaaaaacagtttaaagaaaaaattgaaaaattaaatcaaaaatatactaaacaaaaagaggaaaaaactactaaaatattaaaagaagtcttgcagtctgattatgcaaaatcaaggctcgatttaaaagattttgatcttcaaaaagtgtatctagctcagacgtcaaatgaatttgaagaagaattagaaaaagaatgctataaaattttaccatattatattgataataagttattgtccgaattagaaactctatttaaagtgtttaaatgtaaaatccaatcttatgatcttgataaaagatttaaaaatgaaacacaaacaccaaaaagtctagaaaaaagacatacaagagaatactggaacgaattctggcaaaaattaaatcaatcaaaaataagattaaatccagagatacgagtcaactataaagaaaaagacaatgagatggaacgatacctctggaaaagatataatgtcgataaagaaaagatcaaagaaaacaaatatggttttaatcggaatctgcaagataaatatatcatcaacttttctttcttagtaaacacaggtaaaaaatttttagatcttggatttgcagattcaaatgagatcaaacacgaaattgaagatttcaatattgatttaaataaaaagatgaagaatccttttttttgtgggatagatattggagaagtagaattagcaagctctgctatctacgcctttgatgataaacacaaatatcaattcaataatcaaaagttcataagaccagttattcccgataatttgccgataaaatgtttaagactaaaaaaggaatattatacaaaaagtagaaaaccaagtaaacaaaaagtaaattttaaaaaaatcgaagaaagacagataatatcaaacctttcctattttagtgatcaagaagagttatttgatgaaatttctccctttgccttaaacttaacatgttctaaagtaataaatggcgtcattatcgaaaatgcagacatacttacttatttacaatacatgaaaaaattagctaaaagaaggttatttgaaatttattcaaaaggatttcttgaaacagataacaaaaagcataattttcaagatttgaaattagattggcaataccctaaagaatcaaacaaatacaaatcaaataatttaatcttatgcgataaagaaaataaaattgtaaaggcaaaaatatttactttcatctacgaatatgaaggaattaaaaccaaaaatggagaatatgaatttgattcaatgaaggattattttaacaaatatttaaataaattaaagaagataaaaaaaagtaatgataataaaataataaaagaagatattcctagaataaacaacttaagagatgcattagtttcaaacatgattggagtattaaacttatttaataaatttgttgacctatatgtcgttttagaaaacattccaaataagaataagcaagatgaatatctcataaaaaggttagagtctgctttattccaaaagtttcaaacttttggaatggttcctccaaatgtgaaaaatttaataaagattaaaaaaatgctacagactaaagaagataaagattccggaaaagaaatccagattggcaatatcttatttatcaacgaaagaaaaacaagtcaaacatgtccttattgtgaaaacagtgataacaatcaagatcatgaaaaagggatttttttatgttcaaaatgtaatttttcaactaatgataaagaaaaaatacatttaactgaattaaagattttgaaaagctgtgatatagttgcagcatataacattgcgaaaaaaggttatcaatttatcataaatggaacaaaacataaaaatatcaaatctgaatga

SEQ ID NO: 184 - DNA, 3036 bp, Unknown
  Metagenome-Derived Sequence
  misc_feature (1)..(3036): Unk16 Csm1 gene
atggattaccaacaatacgaatttacaagaacaatcagatttaatctctctggtgatgataaacgcgccttaatgttggatttgctcgacgatacccaagaggggatgcttgccgcttttcaggaaacctacaaaaatcttttattcgcattccaagaggcgatattgcgggcagatgggagtggtaatttaagagtagggcggttagaaataaaaaaatcatggcttagacagtacgcacgagaatatttttatgcgcttagcgaagacgaaaggcgatgtaagaataagtttcaggcaaagttgtttgatcgtgttttgagcgactggctggaaagaaacaatgaattactacaaagacttaataatatattgtctttgccgcaagaaagcaagacgggggcatccgatctttctttattagtgcgacagctcaaaggtgctgaatatttttatttcatacgtgattttacgcaatcggggataataaatgacaaggattcagacgagcatattaaaaatttggcgggtatagttgaaaaatttgaaactctgcttgacaaggtgctttttcttacggcgccaaattcaagccaaggagttgagacaacgcgcgctagctttaattactatactgtcaacaaaatctctaaaaattttgatgagaacatcaagaaagcgaatgggcgactgtgcagttcttatcaaaattcaatgaatgaagagctgttacgaaaagttggatttttgaagtatctcaaagatgaataccgagcagagctacaaaatgtttcgttaaaagatctgtatgaggcgcttaaaaagttcaaatcgcagcaaaagacagcttttatacaagcggtgcaaaaaaataaatcggagaaggaattgatgagggaatttccattatttaatggaaaacaacccgatacgcttcagaaatttattttagaaacagacaaaataaagcgcggggcatactttcaaaaatggggttttgataattatatttcattttgtaataagatcttcaagccagtagctatggaaaccggaacgagaaaagcgaaaatcagggcgcttgagcaagaaaagatagaggcacgtcttttgcagtattgggcgcacattcttgtaaaagacggcaaatattttttgcttctaattccaaaagaaaaaatgggagaggcaaaagtatttttcgctcgactttctgatcaagaaggtggagaatacaccctctacgcctttaactcccttactctgcgcgctctcaaaaagcttatccgcagaaaccttggaaaagagcaagttcgccttagcgccggagatgccgatgcaatcgcgctatgccaagaagttttgcggggtaggtatcatcagctcaaagatttggacctcagcggttttgaaaaggaaatagcagaaattgccaatactcaatacgaaaatgaggaagaatttagaatcgccctagagcaggtggcctattacctttcggaaaggaaaatgaacgaagaaagcattgaatatctcaaaaaaaatcttggcgcgatattgcttgaaatctcttcttatgaccttgaacgcaatatcaccggcgagtcaaaagagcatacacggctatggagcgatttttggaatccaaacaacaaaaaagagtgcttttcgacgcgtttaaatcctgaattgcgtatattttatcgtccaccaagagaacaaaaagaccctaaaaaacaaaaaaatcgtttttcaaaagatcatcttgccgttgcttttactattgcgcaaaatgctgcgcgaaagcgcatggaaacaagttttgccgaagaaaaagatttggtagagcaggtcaaaaaatttaacgaagaagttgtcggtaaatttatagatgaaaaatcggacaatttatattactacgggattgatcgtggacaacaggaattggcaactttatgtgttgttcgcttttccaaagagcattatgaagctatgcttgaggataactttataaaaaagtttagcaaaccgatccctgcacagattacagcctatcgcattaaagatgaacatatgtcctatcggaaaaatataacaagagacctaaaggggaatgagacggaggaaatactattcaaaaacccttcgcactttattgatgaagtagaaaactttgaggaggtttccacaccctgcatagacttaactaccgccaaactcattaaaggcaaaattatattaaatggagacatacaaacatatctggcgctcaaaaaagcaaacggcaagcggcaactatttgagaagtttgcaaaaattgatgattccgcaaagattgaatttgatgatagtgaggggcgatttcaggtgaagtcaaaagcgacagagcgtgaggagtatcaatttcttccttactatggaccggaacaagaaaacatatctccgcgggaggatatgcggcgggaactacaggcctatcttgataaattacgctcaagcgaaagttttgaagaagatataagcattgagaaaattaaccacctgcgtgacgccatcacttccaatatggtgggaattattgcgtttctatttacggaatatccgggaattatcaatttggaaaatctgcacagcagagagaacattgaaaagaattggcgtaaaaataacgaggatatctcgcgtcggctggagtggggcttgtataaaaagttccagaaaataggacttgtgcctccgcgattgcgtcagacggtcttgcttcgggagaacgagacggaaagacaagaaaaactcaaccagtttgggattattcattttattcctaccgagaaaacgagtgcgcgttgtccttattgtggcgaaaatacgccaatgaagcaaagaaatgaagacaagtttaaattgcatgcttatatttgcaggagtaatgaggaaaactgcggcttcgacaccagagaaccaaaatcaccgcttgaatttattaaaaattcggatgatgtggcggcttacaacattgcaaaaaaacggctttaa

SEQ ID NO: 185 - DNA, 3090 bp, Unknown
  Metagenome-Derived Sequence
  misc_feature (1)..(3090): Unk17 Csm1 gene
atgcgtaagatgtttttgtctcttgcgaatattgtctgcgaagtcttggtacctttatgcaacggctcaatttgctttcctgatattgaaaagatgtcagataaagatgagaacaagtatcttcgcgagtttgcggttgattataaaacaaaaatcgatttatttgattctatctcagaattgcgaaaatattttgaagaaaacggcgggaatgttcctttttgccgggcaacgcttaatcctaaaacaaaaataaaaaatccaagttcaacggataatagcattgaagctgaaattgagaagattgggatggaaaaatatttgcaaacaacagatgaaataattactgctattaataaaataaaacaaatgcaggattccaaactgccgcttattaagcgggcacttctatttaaatataaaactattccggcggttgttcagtttgatttggcaaaaagtatcggcaaaaaattaaacaaagaagaacaagaattaagaactattattcgtactatcggacaaactgcaagccctgcaaaagattatgcagatttgcaacataaaaaagagttcaatatcaatcaatatccgttaaagcctgcttttgattatgcctgggaatcactcgcaaaagcggaatatcataatgatattgaatttccaaatcaaatttgtaaacaatttctaaaagatatttttaatgttgatactgaaacagatagttatttcaaactttatgcgcaatttttatatttgcgggagcttctagcaacattagaacatagccaacctacaaatcctgagaaaattgtgaagattatagaggagttattggaaaaaataaatgcgtggaaagaaattgatgataaaaatagcgaaaagtacaaaactgccattagcaattggttaaaaacattcaataaagaagataataattttaaaaatgcaaaacaaaaaatcggtttatttcgcggcggattaaagaagaaagccggagacaaaagcagatgggaatatttgagaaaacctgatgaaaaagaagctccaaaattaactgcatataacgcattaacgcaaatatataaagatattgcaacgaacttaggcagaaatcttgcagatatgcgagataaaattactaacgagtcagaacttaataaaatttctcattatgcagcaattatagaggataagaacggcgataaatatgttcttttgaaaaaatcagacaaagatgaagaattcgctttgccatgtgaaaaagacgcagaatataagacatacatcgttaattcaataacttcttctgcgattgctaaaatgattcgtaaaaagagagctgctgatctagctaaaaatattaggctaaaaagcgaagaactgaatgatgaacaaaaagaggctaaaaacttaaaagactggattgaattgataaaaaaacagcagtatgatttcgaatttaatttaaatttgaataataaaaattttgagcaaataaaaaaagaaattgatgcaaaatgttatcaattacaaaagggtaatatttcaaaacaaactcttgaaaaattgattaatgagcaaaaagaatggctgcttcttcctatcatcaatcaagatttagcaaaaagagataaatcgactacaaatcaattttctaaagattggcaaaaaattttttccgataaaaggtgtggatacagattaacaccagagtttagaatctcttatcgcaagccaacacctaattaccctcaatctcagataggggataaacgatattcccgttttcagatgatagcacattttctttgcgattatattccgcaaggtaatctagaatataaatcaacgcgccaacaaatagaaatttttaaagattatgagaagcaggaagaatcagtaagaaattttacttataagatatatgctaataatgattatttaatatttggcattgaccgcggactaaagcaactggctacactttgtgtcttaaacaaagaagggaaaatatatggtggttttgatatttacacacgtagctttaataaagataagaaacaatgggagcattctttaagtgaaaagcgtaatattttagatttatctgatcttcgcgtagaaaaaacgattacaggagaaaaagtattggttgatttaaacagtataaaagtgaaaggtaatcaagataaccagcagaaaataaagcttaaagaattagcatatataagaaaattgcagtttaaaatgcaaacggaacatggaacagtaataaactttattaataaatatagaacacctgaagaaatccagaaaaatattcatgagttgataactccttacaaagagggtgaacattacgccgatttgcctactgaaaaaatttgtaatatgctgcaaaaattcaaagagttttcagataaaaatgatggaaaatcaaagagagagcttatagagcttgattctgccggcgaactcaaaaatggtatagttgctaatatggtaggtgtagtagcatatttgttagaaaagtataaatataatgtttatatttctttggaagatttaacaagagcatataggcgtcaaactgatggtttggacggcagggaattgtttagttcaaatgatgataaatctgtagattttaaagatcaggaaaatactgctttggcaggccttggcacttatcatttttttgaaatacaattactgagaaaactatttcgcatacagcaagaagatggaaatattctgcatttagttccggcattccgtagtgtggacgattatgagaagattattcgaagagacaaaaaaatagatggcaacgaatatgtggattatccgtttggaattgtgcgttttgttgaccctaaaaatacttctaaaagatgtccgctttgtagcagtataaatataaatagacacaaaaatattataaagtgccaacaaaaagcttgtggctttaaaactccatgggataaaacgaacgataaaaatattcaatatattcaaaatggcgatgaaaatggagcgtatcacatagcaaaaaagacattggataatttaaataataaaaaataa

SEQ ID NO: 186 - DNA, 3243 bp, Unknown
  Metagenome-Derived Sequence
  misc_feature (1)..(3243): Unk18 Csm1 gene
atggatagatttaagaatttatacgaagtaaaaaagacagtgaggtttgagttaaaaccgagtaggaagaaaatttttgagggcggcgatgttatcaaattactgaaagattttaaaaaagtacaaagactctttttagaaatttttgtttacaaaaaaaaagactcaaaattagagtttaagaagaaaagagaaatcaaatatacatggctcagaactcatacaaaaaatgaattttataattggagtagaagaagtgatatagaaaaaaattacgttttaagcaaaatagattttttgccagaagaaattttgcgatggcttgacgaatggcaaaaactaacagaaagcttggaagatataacacaaacagaagaacacaagcaaaaaagaaaaagcaacatcgcttttgctttacgaaaattttcaaagaggcaaaacttgccttttataaaagatttttttaatgctgttattgatattcaaggaaaacaaggaaatgaaagtgacgttagaattaaagaatttagagggaggctaaaagagatagaaaaaaattttaatgcttgctccaaaaaatatcttccgactcagagcaatggagtacttttgcataaagcaagcttcaattattataccctgaacaaaactccaaaagagtatgaagatttaaaaaaagaaaaagaattagaattgaatggggttttgtcgtgggcaatttataaaagagaacgagttattgatagacgaacagaacaaacagaaatcttatttgattgcgatattgactggttaaaaaagattggacttggcgatgaaattcagaactgggttcttgacgaagcttatcaaaaaatgaaaatttggaaggcaaatcaaaaatcagattttatagaggcagttgcgagagataaacttacattccaaaactttagaaagaagttcccactatttgatgcctctgacgaaaattttgagatttgctataaacttacaaaagagcttgataaaaaaccaaaagatgcaaaaaaagtagcacaagaacgaggaaagttttttaacgccccaaaagaaaaaattcaaaccaaaaactattttgaactctgtgaactctataaacgaattgccctaaaaaggggcaaaataattgcagaaataaaaggaatagaaaatgaagaggttcagtcccaactcttaacccactatgctatggtagcagaagaagaaaacaaaaaatttattgtatttattccgaggaaaaatggtgaagaattagaaaatcacaaaaatgctcataagtttttacaaggaaaagaaaaaaaagaatctggcgatgtaaaggtgtatcattttaaatctcttactttgagagctttggaaaagctttgctttaaaaaaactaaaaatacatttgctccggaaattgagaaagaaacaaaccctaaaatctggtttcccaaatataaacaacaatggaacaaaacaccagagaaacttatcgaattctataaaaaagttctgcaatccgattactctaaaaaatatttagatttggtagattttggaaatttaaataccttcttgaagactgattttacaaccttagaagaatttgagtcagtccttgaaaaaacatgctatacaaaagtgccagtttacttttctaaaaaagaatttgaaacatttaaagatgaatttgaagcagaagtttttgaaataaccactcgtagcgtatcgactgggagcgcgagaaaagaaaatgctcacgcaaaaatttggaaggatttttggagcaggaaaaatgaaacagcaggccatactattcgtctcaatccagaggtgagtattttttacagagatgaaatcaaagaaatgagcaatgcctcaaggcagaataggacatcagatgtaaacaataggttttctgaccctcgttttacacttgcaacgacaataacgactcatgctgataagaaaaagccaaatctagccttcaaaaaaattgaagacataaaaaatcatattgatagctttaatacagtcttcaatagagacttttccggtgtatgggtttacggaattgatagagggctcaaagagctcgcgactctaaatgttgtaaaattttctgatgtaaaaaataaatttggagtattacaaccaaaagaattcgcaaaaatttctatttataaattaagcgatgaaaaagcaattttaaaagatgtcggtggaaagagcttgaaaaatgcaaaaggagaagatcgaaaagtaattgataatatttcagaagtgctggaggagggaaaggagcccgatccaatactttttgaaaatcgaatagtctcttctatagacctcactcaagcaaagctaataaagggacatattattactaatggtgatcaaaaaacataccttaaactgaaagaaacatcggcaaaaagaagaatctttgagctgttttcaaatgctcaaatagataaaaatactacgatctctggaaataaaacaatcatgctgggtaaaaataatacaatatattggctttgtgaatggcaaaggcaaaatccttggcgagataaaaaagaatctttgatgcagtctctcaaagactatttacaaaatttagatataaaaaatcactttaaagatattgaaacaatagagcagataaatcacttgcgagattcaattaccgcaaatatggtagggcttctatttcacctgcaaaataagttaaaaatacatggagttatagcattagagaatttggatactgtgcagaaaaagagcgatagtaaaatgatcgatgagcattttgaacaaagtaatgaagatatctctcgtcgtttggagtgggctttgtatcgtaagtttgcaaatacgggagaagtgccaccacagataaaagagtccatcttcttgcgaggtgaatttaaggtgtgtcaaatgggaattttgaagtttgttgaagttggtggaacaagtcgaggatgtccaaattgtcaatctgagtggaatcaggaatgtggaaatcagtgcaatcccaaatgtaataaatgtacagaaaatgattcctataagaaaaataaaagaaaaaatgtttatatatgtaaagatgataatcaatgtaaattttcaacagaagagagtcgaaacttacttgaacaaaaccttcataactccgatgacgtcgctgcttataacatcgccaaaagaggcttggaaataaatagtatctag

SEQ ID NO: 187 - DNA, 3258 bp, Unknown
  Metagenome-Derived Sequence
  misc_feature (1)..(3258): Unk19 Csm1 gene
atggaaaaatacaaaattactaaaaccattcgtttcaaattgctgcctgataaaattcaagacataagccgtcaagttgctgttctgcaaaattctacaaacgcagagaagaaaaacaatcttttgagattaatccaaagggggcaggaattaccgaaactattgaatgaatacatccgatacagtgataatcataagctgaaatcaaatgtcactgttcattttagatggttgcgtttgtttacaaaagatttgttttacaattggaagaaagacaatacggaaaagaaaatcaaaatcagcgatgttgattatttgtctcgtgtgtttgaagatttttttaatgaatgggaaacagtaattgaaagaataaatactgattgcaacaggccggaggagtctaagacaagagacgcggaaatcgctttctcaataaaaaaaattgcaaccaagcagatgtttccattcataaaaagttttgtttataatagtaattacaaaaacagcgaagaaacaaaaagcaaactaaccgctttgctaaatgaatttgaaacagtattgaaaatatgcgagcagaactatctgccatctcaatccgcgggcattgtgattgccaaagcgagtttcaactactataccatcaataaaaaacagaaagattacaaaggatacactgatgatattgaaaaaatagagaaaggaatgaattcaaaatttcattatgaaagaaaatatgaccagttgcttgaagaattaaaccttatcgctttaaaagaattaccattaatcgaattttattcgaaaatcaaaagctataaatcaaccagaaaaatcgagttttcagaagctgtttccaaagggttggcgtttgccgatttaaaaagcaagtttcctctgtttcaaactgaatcaaataaatatgctgagtttttagaactgaccggcaggataacgcaaataagtaccgcaaaaagtttgctttcaaaagataatcccgaagctcaaaaacttcgagacgaaattaagaaattaagaataaacaggggtgaatattttaaaaacaattttcataaatatattagcctttgcaatttatataaaaaaatagctgacaaaaaaggcagattaaaaggccaagtcaaggggatagagaacgaaaggattgattcgcaaagaatacagcactgggcgttggtgctggaggacaatttaaaacattctctgattctaataccgaaagagaaagtaactgaggtttacagaaaagtccgggcttcaaaggccgatagtacaagttcaagttcgtcattgtactactttgaatccatgacctatcgcgcattacacaaattgtgttttggtgtaaacggcaatacttttttgccggaaatccagaaagaactgcctgaatataacccaaacaaacaaagtgactttggtgaattctgtttccataaaagcaatactgataaagaaattgatgaacctaaactaatatccttttatcagtctgttttgaaaactaattatgtcaaagacaatctgaacctgcctcaaagtgtatttgatgaagcaaccgtccagacatttgaaacaaggcaggactttcagatagctttagagaaatgctgttatgcaaagaagactatcatttccgaaactttgaaaaaagaaatattagaagacaacaatgtgcaaatatttcaaatcacaagtcttgatttacagaggtcagaacaaaagaacctgaaagcacacacaaagatttggaacagattctggacgaaacaaaatgaaacggctaattatgatctgcgtctgaatcctgaaaccgccattgtctggcgaaaacctaaaaagacaagaatagataaatatggagcaggaacatcattatatgatccgaaaaagcggaacagatacttgcatgagcaatatactctttgtaccacggttacagacaatgctttgaataatgaaattacttttgcctttgaggatacaaagaagaaaggcactgaaatagttaagtataacgaaaaaattaatcagacattaaaaaaagaattcaataaaaatcagttgtggttttacggcattgatgctggcgaaattgaattagcaacgttggccttaatgaataaagacaaagaaccgcaattgtttacagtttacgaacttaaaaaatcggacttcttcaagcatggatacatttataacaaagagcgtgaattggtgatacgcgaaaagccgtataaagcgattcaaaatctatcctattttttaaatgaagagctttatgaaaagacattcagagatggtaagtttcaagaaaccttcaatgaactgtttaaagaaaaacatgtatccgcgatagatttaacgacggcaaaagtgataaatgggaaaatcattttaaatggcgacatgatcacttttttgaatttgaggatattgcacgctaagcggaaaatatatgaggaactgataataaatccgcaagctgaattaaaagaaaacgaaaaagaatattatctgtattttgataaagagggaacagaaaaagttgaaaagatttatcgaagcagattggattttgaacatattaaaccctatcaggaaattagaaatgacctgaatgcctattttaaaaatgttcaaaaaaatgaagcaaaagtggaagatcaaataaatcaaacacgaagagcgcttgtcggaaatatgataggcgtgatttattacttgtatcaaaaatatcggggcattatttctattgaagatttaaaacaaaccaaagttgaatcggacagaaataaatttgagggcaacatcgaacggcctttggaatgggcattgtaccgaaaatttcagcaagagggatatgtgccgccaattagcgaacttattaaattaagagaacttgaaaaatttcctttaaaagatgttaaacagcctaaatatgaaaacatacaacagtttggaattatcaaatttgtaagcccagaagaaacaagtactacttgcccttcttgcgagaaaaaagcttatgaattacaaaaagaaaagaaaggagaagaaaagcccgctgaaaacaaacgatatgaagcggataaaaaggcaggagttttctgctgtccaaaatgcggttttcataacagaaccaatccaatgggatatgaaagtttggatagtaatgataaagttgccgctttcaatattgccaaaagaggatttgaagacttgcaaaagcacaaataa

SEQ ID NO: 188 - DNA, 3264 bp, Unknown
  Metagenome-Derived Sequence
  misc_feature (1)..(3264): Unk20 Csm1 gene
atggatagcataaaaaaagatcccaaagaagcgatgcctcgttttgaaaccgtgcgaacggtgcgttttgaattgaaaccgtcggctgataccctggaaaaactaaaagccgtccttccaaggggggattttcaagtagacatagaaaaatttataaccggtttgagaaaattttattccggactggccgatatcattatcgacaaatcggaagaaggatttgcattgcgaaggggtatagaaatcaagtacggatggctaagaagttataccaaaaatgatttttacacattcatagaaggcggcgatggtagattgccgataaagtatgggatttcagatgtcggatatttgaagagagagctgcaaaggtggtttgtggagtggaaagagataattctagaattggaagggatgattcaggcaccattagaaagccagcgtaggaggcgggattttgcccaattgataagaggtctgaagaagaggcagaattttgaatttattagggaattttcaaaggctctttgcaataccaacgaccctgcaaccgatcatttgattgaagatttgcgtatttccattaatagtttggagggagagcttcaggaggtcgaggcggcttttgcatcttctcagagtgccggttttcagatagctaggggcagttttaactactacacgatcaacaaagatccaaagtctttaaaaaccgaagaaaaagaggaaagggataagttgaatcgttcattgtcttcttttaaagacaaatttgggagtcaggaattttttttaagtggaaagttttcttttattgacgcagcgacaggagagggaaggaaagaggattctgcctcttggacattggaggaatcgtacgggaaattgaaggaatggaagtccgggcagaagaagaagtttttggaggcaatacaggcaaaaattattacagtcggaaatttttcgtcgaagtttcctttatttgaatcttccaaagaagattttttggcgtttttagacctttcagaaaggatggcagaagctaataagaaaaaaagccgtgaagagaatgaaggcaggaaaaaggaaatagataaagggattaaacaactagcacaacaaagaggtgaatttttcaataaaccgggcaagagagtgcaaacaagaaagtactacgatatttgtcagatttttaaaaatattgcgtttaaaaggggagggatagtagcaaggataagcgggatagggaacgagaggagagagtctcaatctttgcaatattgggcgctaataatggaggagcagaaaaagcatttcttgataatgataccgaggggtgaatcggagaattataaaaaagcgagagaatcgatcgagaaaaggctcgcggaaagaggagagataaaaatatatcatttcaagtcccttacgcttcgtgctttggaaaaactttgttttaaagaaatcggtaacacttttgctccggaattaaagaagcaaggcgtcagatttccaaggtataaacaagaatgggggggccaagaggaaaggatggttaaattctatcaagaagttttgacgtcgagctatgcgcataatctattggatattgccgaattcggcgacttgcagtcgttgctgaagaaggaatacaaaagtctagttgattttagatccgatctcgaaaaggccgcttacctcaagaaagaaatatatttggcagatgatgaaaaagaatcgtttttgagaaattacgacgctttagtgttcgagatcgattcttacgatcttaggatagaaagcgagaatcgtcccgagaataagggtcatcaggataaggcccatactcgattatggaaagatttttggacatcgcaaaataaggagatcggatatggtacccgtttgaacccggaagtgaaggtattttggagagaggcggatgaggagttatccaagagtttaagtagcggtaagatatcacagcctagaaaactggactatttccgcaatagatattccagaaatcattttaacttggctattactattacttctaacgctatcgaaagaaagaatgacctggcgttcaagtccattagcgatatagaaaaatatatccaaaattttaacgatgactttaataaaaatttcaagggagagtggttttacgggattgataggggactgaagcagttggctacgctttgtatcatgcgattttccaaacagtcctatcccataaacggaaagtcgctttcctgccctgaattttctagaatagaggcctggcaattaaaggatgagaattattccgaggatgtaaaaagggaagacggaacgcaatttagaaggagcgccataaagaatttatcctattttctagacaaggctgaactgttcgagaaaaaaatggtttcttgtatagatcttacaaccgcgaaaatgataaaaggaaagatcgttttgaacggtgatctaatgacatatttcaaactaaaagagcatgcatcgaggagaaaaatattcagtcttttttcggagtcaaaaattaatgatagctcggagataaaaataagcaagagcgggtcaacgatcgttataaaggacaattgccaagaatatcagccgatttattggattagtcaaaggcaggagaagaagacaaaaggtatgtatagagagattgaaacccccgaacaaattataaaaaaattagacggatatctcaaagatattggccggaacaatataaacgaggacattattacggttgataaaattaatcatttacgcgacgcgatcactgcgaatattgtcggagtggtttcgcatctgcaaggattattccctggcattattgccttcgaagatatggatgaagaagaccacatctctaaacatttcactcagagcaatgaaaacataagccgaaggcttgaatgggcattttataggaatttccaggttaaagggcttgttcctccacaggtaaaaagtacaatctttttgcgaaaggaatttaaagataagcaattcgggatagttcagtttgtgaaaatggagaataccagctgcaattgccctagatgcggagagaaatttccaaaaacatcggatcatcgtcattacatctgcggcaatccgggctgcggtttttcttcgttgggcaataggatggagttctctcctcttgacgattccgataaggtggcggcctttaatgtggcaaaaaatgctttcaataaattgtatgagatttaa

SEQ ID NO: 189 - DNA, 3315 bp, Unknown
  Metagenome-Derived Sequence
  misc_feature (1)..(3315): Unk21 Csm1 gene
atgaaaaattataaattaactaaaaccatccgttttaaattagaagcagacgaaaagaatatttcagatattaaaaaagaaatcaagagtattgaagcaaaaagtaatgagtttgagctcgctaattttgttactgagttgaataattatatagctaatatcaaagcctatttgttttatcaaagaaaagacggtttatcggctataaaagataaaatgaccataaaaaacgaatggctacggcaatatgcaaagcaagaacttgtagaatttaaagttaaaacacaaaagtcaaactatacagggaataaacgtagagaacaaattacaatcagtgaaatcagtgaattatcacaaaaaattacaaaagcatttgatgaacttgttgttatctatacagagcttgcagatagcgcttctttggaattgaacgaaagagcaagaaaagcaaaaataggattgttactgaaacgtctatgtgcaaaaaatactttgcccttattgtcttcgctcatagacaacacatccgacaaaaatgaaactgacgacttaagtatccggctcaaaaaacaagctatcaaaatcaatgctcaattattggtcggcattcggatgtatttgccggaacagtccggaggtttacccataaccaaagcaagttttaattattataccattaacaaaaaacctgttgatttcaaagaaaggatagaggatttggaaaaaaaattggaagttcaagatttggaaaaactcaacatttattttgataagaaaaaaagaacagaaaaagactaccttgaaaagaagatatttaagttgcttgaagccgatgttcaaaaatcattaccaaaaaaccaaactctttgtcttggtgaagcgccaatgattaaaactgattccgttagtttacggcaatttttaaaaaacataaaagcagaacagaaaaagcaattttccgaattgatgcaaaataatattccatacgaggaattagaaaaaagtaatttgtatctattaaataacatcaagtcggaacaatttactgcttacaaagaaaaaacaaaaaagttagaagaaattgcaactaaattaagcaaccaaaatttatccgaagatgttaaaaagaaattgagaagcgacaaagaaaaaattgcaaaagaacgaggcggtattatgaaagataatttttttgcttggaaatcttttgccaatttctatcgctctattgctcaaaaacacggcagaatattatctcaactcaaggatatcgaaaaagaaaaagcggaatcccaattactgaaatactgggcattgattgttgaagaaaataatacgcacaaactcattctcattcctaaagaaaaagccggcgaatgtaaaaaatggttagaaactcaaatctatatacaatcaacaaataatccaaaaattatttggcttgaatcattaacatatcgaagtttgcgaaaactttgctttggctttgtagaaaacggaaataatgaatttaatcaaaacatcaaagatttattaccaaaagacgaaaatggctataccattaaaggagaatttgactttaaaggagatgaacaaaagaaaataaagttttacagaagagttttgagttctaaatatgcccaacaagtattagatattcctgctgaacaaattgaagaagacattatagaccaatcattcgacagtttggatgattttaaaattgcgctcgaaaaaatatgctacagccgccatgttgtttgtccgtctgatattgtagagaagttgaaacattatgatgcccaaatttttgaaattacttctttggatttaaaaaatccggaaaatgtaaaagaaaaacaagataggtttgaacattttgataaacatcacacacaaatctggaaaaatttctggacaggtgaaaatgagaaaaacaattttaacatccgtctaaatcctgaaattacaatcacttatcgccaaccaaaacaaagcagaattgaaaaatatggtgaacaaaaatcagacaagaaaaatcgatatttgcatccgcaatttaccttgattacaacaatcagcgaacacagtaattcgcctacaaaaattttatcgtttataactgacgaagaatttaagacttcagttaacaaatttaacaagaacctcaaaaaagaaaatataaagtttgcattggggattgacaataacgaagtagaattttctacgcttggagtttatttccctgcatttgccaaaacaacaaatgaagaaaaaattgcagaattaaaacaggttaaaaagtatggctttgaagttttaaccatcaatgacctgaactacaaagaaaccgattacaacaacaaggaaagaaaaattattcaaaacccctcatattttttgaagaaagaaaactatatgcgaacattcaacaaatctgaacaggactatgaaaaaatgtttgcagaacaatttgagaaaaaacatttgctcacattggatttaataacagcaaaagtgatttgcgggcatatagtcgctaacggcgatatacatactcattttaatttacaaatgcgggatgcccaaagattaatttacaaaatgaacgatcatacacaagaagaaacaattggtagaataaaagattttaaaataaaagaaacagaagcaaaaaataaagtgtatgtaaatattgatgctaattttattgacggcggattcaaatctgtttttgaaatacgccctgaattttcaaatatcaagttaaaagaggaaattctatcagagataaaaacatttaatactcgcagcatatctaatgaagaattagatttgaagattaatcatttaaaacgatctattatctcaaatgctataggcgttattgattttatttacaaacaatacaaagaacgatggggtggagaaggtttaattgttaaagaaggttttgatacaaaggaagtagataaaggtatcgaaaaattcaacggaaatatttatagaattttggaaagaaaactctaccaaaaatttcaaaattatggattagttccgccaattaaaagtttaatggcagtaagggctgatggtattaaaggcgacaagaaagctatattacgattaggaaacatcgcttttatagatccgacaggaacaagtcaagaatgtcctgtttgtagtgaaggggaattagatcatactaccacttgttcaaaaaattgcggctttgaaagcaatgggattatgcactccaacgatggcatagccggtttcaatattgccaaacgtggttttgaaaatttttattga

SEQ ID NO: 190 - DNA, 3369 bp, Unknown
  Metagenome-Derived Sequence
  misc_feature (1)..(3369): Unk22 Csm1 gene
atgtctacaataataaccgctaaacagctagaagctctcgctgatatttatcaaacaagaaaaacaatcagatttaacctactaccagtaagtctttctcacaagaaaacctccgaagatgagtttaaaatagcactgggacaactcatagaaaactacaaacaagtcgttaacaatttcaacgacacggtattttcttgcgagaatgagatagaaatactaaatccgcgaatcaaaatcaattgcaggtggctaaaagtgtatacgaaacaagatttttaccaaaacgcactacgattaaaaaacaagaatatagatttaggcgaggccgatttcttgcttgaaattttccaagaatggtcaaaaaggaactggtcagaagaagtatgtacagaaatcgaaaagcctggaatcttaaacgagatagaggaattaaaaaaccagccgctcaactgtcagaaacgaaaagcagattttgcatattgggtccatcagctgcaaacaagaaataattttccttttatccatgaactttttgaaaatataaatgatgaaatgggtggcgaaaatgacgaacgcatagcaaatacaaaaaagatattagatatctgcgaaggctgtcttaaaaagattgacgactatctgctcccgagccaatcgctggggcaagaaatagaaagggcaagtttgaattactacacgataaataaagagtcaaaatattatgaaaacgagattaaaaacaaagaaaaaaccctagaagaaccaccaacgagcctccgcttttacaaagatacaaattttcttaagaatatatcgaaggatctaccattctttattgaaagcctcaacaaaagcattcccgagaatgcaaaatttatagccagcgtaggcgacccaaataaggcagagaattggtcactagcccaggcttatcaaattctgaaattctataaaggaaaacaaaaatcgaatctgatggagttcgtttcgcaaaaaccttccttctctgaattgcaaaaagaaaaggggttgtctctcatgaaaaaaataaaagacaaacgcagaagtaatgagcaagtattccaagattttattactcttgcaaaagaaattgagcagttaggtacggaaaaattcagattggatataaattcggaaaattatcctcagcaaagtatagctctacgcaaaaaaattaaagaaacgactcaaaaaagaaataaatatttcatatacaatttcaccgaatatatcgattttcacaaaggttttgatgagatcgcgaaagaattcggaaaaatcaacgcggatatcaaaggactgaaaaaagaaaatattgacgcagaaagattgaggtcatgggctgtaatactggaaaaaaacagccagcattaccttatgacgattcccaagaaagacggcaagctccccgaagcctatagggagatcaaaagccttcgatcggaatcaggagaaaatctttggactctatcagttttcgaatccctaacccttagagcgctcgacaaattatgtttcaagaagatcgacaacacattcataaaaagcatagaaaaagaactaaggggaaaatgtccggaatattttaagcgtggaaaattcatgcttaaaagcgaatttaaagacggacaacctcctgcagaattttatcaagcaatcctttctcttgagacaaccgaaagtgtcatcctggtcaacgaatatttaagagacgagaaaagagacatattactcgaaaaaaagttcacatcgctgcaaaacttccagtccgagatggaaaaaatctgttatatccgcaaagaaatcaaaatttcccaagcaacaaaagaacatctggaacaaaaatacgatgccgatacatatcaaataaccagctacgatctggaaaaggaacgccaaaaccccgaagagcatacaaaaatctggaaaagattctggaatcagaataaaaagagcggatatgtaactaggctgaatcctgaaatgataataaattacgtggaacaaagaataggcagcataaaagacaaaggagaaaaagaagtaaaaagaaacagaagaaaacaggcagaatatattctggcacttacaatcacggaaaacaatgacaaaccaaaaacagatatggcgcttgcaagcaaggatgctgtgaaaaaagacatagaaaaattcaataccgagcgtaatctcatattaagcaacgatccatacagcttctactactacggtatcgaccgcgggcaaaaagaattgattactctgggcgttttcggttttgagaatcaagatatcgccgtgtcggggtgggacaagaacggaagcctgatcagtaaaaattataaaaaaccacgaccagtcacaatagaggcttatgaactaccgcaggaaaaattccttgaagaaatagaatacacggtatcaaacggagagacgaggtctttcgatgcctataagaatatatccctctgcgaacatctgctggtaagaaaagatgttgactcctgtttggatttaagttgtgccaaacttatcaaaggaaaaatagtcgtcaacggagacatctcaacttatttgcaaatcaaaaagacggcggcaatgagatatatcacagacggcctggctcagcaccaatttacaaacgtgctaattcaagaaagagaaggcactctgtgtcttgaagaagaaaagagaggaataacgacattggtagagctataccatttcgacagcagattcgacaatctcgtagaccgcgccaacctaaaaacagaattacaagaacatttcgacaaaatacgagaagaaaactcgcaaggagacatatacacgattgagaaaataaatcacctgcgcgatgcaatctgcgccaatgcagtcggaatcatcgtccacttactacaaaaatatccgggtctgattaccttagaagatttagacatcgagcataagtcaagagaatttagcaaatactacggagatgtgggaagcagaattgagatagctttcatcaataaattacaaaccctcggacttgtgcccccgagttgcaagatggtaataggtatgcagagcaaaaaagagattaatcaactcggcattattcactatgtcaaaactgacggcacaagtggcgactgtcctcattgtggtcaaaggattgacaaaaaaacaaaggatactaataaatggggcaagcaccaatttaaatgcgataacaatggcaaatcctgcggtttcagcacatatgaggacaaggatcataaagaactggattttttgaaaaactctgatgacgtagccacttacaacatcgcaaagctaggttttgaatctatagtggtttag

SEQ ID NO: 191 - DNA, 3393 bp, Unknown
  Metagenome-Derived Sequence
  misc_feature (1)..(3393): Unk23 Csm1 gene; TGA encodes Gly
atgatgaataatattgaaaataaaaacttatatgaagttaggaaaactgttagatttgaacttgaaccacaatttaaatttaattatgaaaataaagatattgtaaataataattttgatttaaataattttattgataaatatagtagttttttaaaattatttaatgaaatagtttttaattttaattgagaaaaattaaattgaaaattaaagataaaatacagctttttaaagagttatacaaaaaatcaatattatgataataaaataattaaacctttaaaattagttaatcaagttgaaatatgaagttctaaaaaatttgaatatttgtttcaaactttttctgaattgtataaaaacaactttgatattttaaataatataaaagaattatcacaaagaagtttagaaaatcaatctagaaaatctgatttagctgtttattttagtgaattatcaaaaagaactaattttgtatttttatatgaattatttaataatagtttaaatattgagaatgatgaagtatcagttaaaattgataaagcaaatattttaactaaagagattgatgaacttataaaaaaaattaaaaaatcattattaccaactgaagtaattgaaaaattaagtttcaattattatacagttaataaaagaaaaaaagattatgataaagagatagaaaataaaataaatgattttagtatacaattaaaagattttaatccaattttaagtatcactcatagttgatttaaaaattatatttctgatattgctgaaaaatcaacattattaaccatagttgattgatacaatttaatgaaaaaatataaagctgaacaaaaatcaaattttttaaaatatttatactcaaaatctagaaatgaagattgtgatttaaatattgatttattttctgatattttaataaagcctgaatttaatgaaattttagacttaacaaaagcaataaatattttatcacaagttaaaactgatattttaaatctaaaagaagctaatgataagaataagaaaaattttgaaattgaatcaactttagaaaaatataataataatttttgaacagatttttgaaaaattgaaagagataatttttttgaaaaaattactaaacttaaaaaattaagatgagattatttttttgaatgaaataaagaaaaatttaaatttaatgactataaaattttttgctcagaatataaaaaagttgcaaaggaatattgaaatattaaagctaaaattaaagctttacaaaaagaaaaaattgatgctgaacaaactcaaagttgggctttgattctagaagaaaataataataaatttttacttacaattccaagagataatacaaataattctgaaaatctatctgaagcaaataagaaaattaaatatttgccttcagataaaaattgagatatttacttaaatatatttgattcacttactttaaaagccttagataaactttgtttttgaaaagaaaataatacttttagaagaactatatattttaacaaggctgaatatccagaattttttaatgataaatgatttttaaaagataaatttgaattttcaaatttagtaaattgacaaaaaattaatgatgaaaaattacttataaaattctataagtcagtattggctttagaatcaacaaaaagacaaattagtttaaaattttttacttgaattgaagattttttacaaactaattttgatactttagatgaatttcaggaggaactaaaaaaagtttgttataccattattagaaaaactataacaaaacaaacaaaggatgaaattataaataattatcaaacaaaactttataaaattacaagttatgatttaaaaaaatatgatgaagattttataaaaacattgaagtataaatcagatttaaaaagaaaaaaaataaataatcatactcaaatatggcttgatttttgggaaaaagaaaataaaaataataaatttccaacaagattaaatcctgaaataaaaattagttttactcagttaaatctaaagtttattcaaagtaactctgaattatttacaaatagacattttggaaatagacttattttaacttcaagttttactcaaaatgctttttgaaaagatttagatttaaattttaaagaaactcaagatataagtaatttttatgaaaaatttaataataattttaataaaaacatcaagccaactttaaaatatagttattgaattgatagatgagaaaatgaattagtaagtttgtgaatttttgatttatcaaaagataaaccagaagaaaaatgagtcaaaatacctgtttatgagttaaaaactgataaattttttgcatatacaaaaacaacttctactggaaaaaatatgtttccatatcaaaatgtatcgtattatcaatatgaagattttccacattattataatgaaattaaatatgtttcttgtctagatttatcaacggcaaaacttattaataacaaaatttatctaaattgagatattcaaacttatttaaatttaaaaatagtttcagcaaaaagaaaaatttatgaaataatttcaaaatcacaacataaatctgaaagtttagattatgatgattataatacaatgatttatattgattgaattaaagggaaaaataaacatatttataaacataattcaaaatatgaaagtattttaagttttgattttgtaaaagatgaacttaaaaaatatattataaaagtaaaagttgatttaaatgataatgaggaagtgtcaatccaaaaagtaaatcatctcagagaagctttgtgtgccaatatggtgtgaataattgattttttacaaaaaatatatcctggaatgatctattttgaagaaaaaaatgaggatgatagaataaatcattttaatataagtaattctagtttaggaagtaaaatagagctaaaattattacaaaaatttgcttcaaaaaattttgtaacaccagtttataaacaaattttaactataaaagataataaaaagtataatattaaacaactttgaattatttgatatgttgatgaaaaaaatacttctgattcatgtccaatttgttgaagtaagttattttgacattgatcttttgaatttgaaaacttaatgcatcattatactgaaaaatattgatataattactgagatagcttagataaagctaaaaaaactacatatgatatttgtgattatcatatgaacgataaaaattattgatattttttcataaactcttgagatgatttagcaacttataatattgctaaaaaatgaattgaatatttaaactctaaaaaataa

SEQ ID NO: 192 - DNA, 3501 bp, Unknown
  Metagenome-Derived Sequence
  misc_feature (1)..(3501): Unk24 Csm1 gene; TGA encodes Gly
atggaaaataataatatgtttaataatcttaaaaatctttatgaattaagaaaaacaattagatttgaactagaaccttatatcataaaaagaaatttaattccagataataatgttaatgaaaatttattgaaagaattttataattcatacaaagactttataaatctacttaaaaagaacttttttaatgataaaaatataatatgagaagaagataaagatattgagaataaaccttttgcaaacttatttaaaaaagcatgaataaatatagaatgaaacaatcaaagttgaaaccaagatattgataaagatatttatgataattatgaatggtataatacaattcaatttaaatataaatggcttgaagaagtatttctaaatgaatggatagataataaagaaaaaatcaaatataaaaatggagaaaagaaacaaaaaaattatattactttttgagatttatgagaaaataattttgtaaaaaagttttttataaaattttttaaagatacagatagtaatttaaaatctttagaacaatatttaaataattgattagaagatcaaacaagaaggtcagatatattatttttaatacaatctataaattcaagagattatttatgaaagttatatatattatttaagaaagataacattgaccataaaaatgattataatattattaaagaaatgaaagaatctattttacaattggaaaaacttataaaacaacttttaaataaacttaaacctagtcaagcattttgacttcctatagaacatataagtttaaattattattcagttaataaaactcctaaagaaattgatgatgaaataaaaaatgagcttaataaaaagaataatatagataaaaaatatatatggacttttgaagacaaagataatttaaaatcgatgttttttaaaagtacagacaaagaattggaaaaagaattggaaaaagaattaaaccaagaaatgagtttaaaagaattaaaacaaaaaatcaaactttttaaagcaaaacaaaaagcaggttttttagaattattacaacaaaaaactccttttaaaaatttcacaaaaccttttgattttaaatttatgggagaaagttttgaaaaatttaatcttgttcttttctctaaaattaacgaagatacttataataaaatgttaaaattgacagaagaaattgaaaaagaaaataataaagcagaaataaaaaaattaaaattgaaaagatgaaaattttttcaacgggaattaaaacaatttaaaggattttgtgatgcatataaaaaaatagctcaaaaatattgacaagctaatgcaaaaattaaatcacttaaaagtcaaaaagtagatgctgaaaaacttagatgatggtgatttttatcacaaaagaataatgattattttataaatacttttgatattgaaaactcaaagaatgtttttacaaaagaaataaaaaacttaaaagaaaattgaaaagatgttgttatctatattttatcttctttaactttaagagcattagataaattatgttttaaaaaagattctagttttattaaagaacttattaataatattgatgataaatttatcaatactaataataaatataaaaaattaaagtctaaaaaacaacttttagaagaattagaagaatgagaacttataaacttttatattgaaattttagaaaaacaaaaaactttaaatatcaaatatagaactgaaaaatctttagatatactaaaatcatcaaaaaatttagaagaatttgaaataaatttaaaacttgaaacttatcattttatatcaaaaaaaatatcagaagaaacttataatagaatattaaaagaatataaatgaaattcttataaaataacttcttatgatataaaaagatgaaaacaaacaaaaaaatatactacttggtggtttgatttttggaaaaaagaaaataaatataataaatatattactagaataaatcctgaaatgacaatttcttttaaagaaaaagataaaaactttatagaagataatcctgataaaaaaagaaatagaaagtttaaaaataggtttatattagctactaacttttccttttatgcagataaatattatatagattctgcatttattaatgaagaaaaaagaaaaaatagtatagatagttttaataaattatttaatcaaaacaataaacttaaatatatttattgattagataaatgaacaaaagagcttataactttatgaatttatgaaataaaatgagaagaattaaaacctgtaaatatttctgtaaaaattcctttgtataaaattacaaaaaagtgatttaaatattttgaggagatagaaaataaaaattgagaaaagaaaaaaagatatttagcaaaaaatgtttcatattttataaaagatttagaaaataaagaattatttgaaaagttagaaataaattcttgtctatgagatttaacttatgcaaagcttataaagtgaaatattattttaaatgctgatatattcacaactttaaatttttataaaataactgcaaaaaggtttttaaatgatgcaattacaaaatgaaaaattgaatgagaaaaagttttttatattgaaaaaaataaaaatttttattataattatgaaaatagatcagaaatagaaaaaaaagttataatttatcggaaagaagaatttgattatttaccttataatgaacaatattataatagtttaatagaagaaatagaaaatgaactaaatagttatattaagaaaattcaatcatctttaaataattcaaaaaaacatcatgataatgaagatatttcaattcagaaaataaataactataaaaatgcaatttctgcaaacattgtttgaattattattaaattacaagaacattttaattgatatatttgttttgaaacacttgatgaatgacaaatacaaaaaaaatgattaaaaacttttattggtaatataataaatgaaaaaatttataatagattacagttaaatctagaagtgccacctattttaaaaaaatttagaactgatgtatgaaataaaaaaataattcaacatggaaaagttatttatattaatgaaagcaatacctcaaaagcatgtcctatatgcaataaaacattattagaagtagataaaaattgaatactaaaagaaaaagatggtaaagatgataataaaatttataaattatactgacatttaaagagaaaaaatgaaaataaaatgcgtcatttatcagataatgaaaaatttcaaccttgaaaaatagaaataaactgaaaaattgaaaaaatttgtgattataatatggaaaaaaataattattgacttgattttataaaatcttgagatgatcttgcaacttacaatatagctaaaaaagcattagaatatttaaattctaaaactaataattaa

SEQ ID NO: 193 - DNA, 3504 bp, Unknown
  Metagenome-Derived Sequence
  misc_feature (1)..(3504): Unk25 Csm1 gene
atggagaactttcaaattagaaaatctttaagattcaaacttgaatctaatgaaaacaacaatttaatcaatgaaactactaatcaattaagcacaagacaagattttgatttgtcaaacttttcaacaaagttagataactttcttaatgacttaaccgactatctattctatgaagacaaacaaggagatttgattataaaaaaatatttaatcttaaaaaacgattggttaaaaacatacgctaaacaacaattctttatttgcaaaaacagtaaacaaacaagaggtaatcaaagagttcaatttactattgaggattgcgaacttgaagatatgattaccgaggttcgtgagaatgtttacgacatttgcgatgaattatacgaaagatcaagagcagatttgcacgaaagatataaaagaagtggtattgcggtgcttttaaataggcttaacacaaaagataacttaccttttttggttgatttggtaaaactatctattgacaaaaaagaaacaagtgatttaagcataagattaaaatcggctggtgaagagttattaaacctactcaaacaagcaatagagcattttcttcctgaacaatcctcgggtatgtgcattacaaaagcaagttttaactatcacaccataaacaaaaagccgatagattttgataaggaaatcaaaaatgttgaaagtagtttacttacttcaagacaagcacaagaaagaaataaaggagggattgacaacaatgtttggaaaactgcttggatagatattaatataaaagcaaatggtttgccactttgtcttggagattctccttttatggaagttgattcttatgcaagtttgcgtcagatattgaaaaatattttggcaacgcaaaaatctcaattccaagaagcgatgcaaagaggggattcttaccgtgagttaaaggaaagcgacttatatttgtttaacaacataagcgaagatgaatttaataagtattttgagtatacagaggagattgagaaacttgcaacaaagagaaatcaaacccatgactacaaattgaaaaaagatttagcaagcaaaatagaaagattaaagagagaacgtggtagtttgataagcgaggcagatagacgaaatactaattatttcagaacatacaaagagtttgcaaagttttatcgtaaagttgctcaatctcacggaagagaacttgcaaagttacttggaattgaaaaagaaaaggttgaatcgcaattattaggctattgggcaatgataattgaagaaaagggagaacacaaacttgctttaattccacgaaaaaagacaaatgacttaaagagacgtttagaagaatctaaaaattctaaggaagaggttaagctttattggtttgaaagtttcacttatagaagtttacaaaaactttgctttggaaaccttgaaaccaacactaatactttttatccagaacttagaaaagatggagcgttacttagaaaattctctttacaagataggaatggttatcctaaattcatatcaggcgagcatgaatttaagggtgatgaattaaaaaagatagatttttatcaatcggttcttgcttctgattgtgctaaaaacaaattgaatttaccatacgatgaagtttataataatgttgttaataaacaatttgacaatttagaagatttcaaaattgctcttgaacaagtatgctataaacgttgcattactactaataaacacttgattgacaatttggcaagcgagtttggtgctcaaattttcgatattacaagcttggatttaagaagagaaagcaacacaaaggacaaagcggaaaaatatacttacaaagaaaaacgcccaacagaactttggagagaattttggaaagaagaaaacgaagaaaaaggatttgacataagactaaaccctgaaatcagcattatttatcgcaaggctaaggaaagtagaattgaaaaatatggtgcagatagcaagaaaaataatcgttatttacacgatcaatacactttggtaatgacttttaacgagcattgcaacactcctacaaagaatcttgcatttgctaacatcaatgacgagcaaaaggttattgaagagtttaacgaaagattcaaaaaagagaatattcgttttgctttgggaattgacaacggagaggttgaactttctactttgggagtttattttccagagtttgaaaaagagagcatcgaagagaaattagcggaactacgaaatgtagaaaagtatggttttgacactttaacaataaaggatttaacatataaggaaacagacttaaaagataaagacaaaaagataatagagaatgtttcttatttcttaaaagaggatttatattgcagaacctttggaaagacagccaaagaatataaggaaatgtttgaaaaggtatttgaaaagaaacgtttattaagtttggatttaagtgctgctaagttggtttgtggtcatattgtaacaaatggagatgttaaggcgttgtataatctttggttaaagcatgctcaacgcaatatttatgatatgaacgatcattcaaaaagagagggattaaaaaaggtagatttcagatatagtgaggacttaaatactgaggaaagaagaatttttattgcttatttgaacgaaggaaatgataaatataataaactttctaaagaagaaaagaatgcgtatgttgattggttatatgaggcttgggcagataatgaaatagaaaacaaaaaattttataatgtttataaagaacaaaaaataaagggtgattatcttcataatgtacttttaggtgcaacctatattggagaagaattgcaaggtgtagaagaaattgctaacattgatcatatcagacacgtatttaagtttagagaagactttgaaaaaatatttacaagagaagagataaagaaagcaattgactcttataataaaagagagatttcaaatgaagtcttggatttaaacttaaataaagcaaaatcttccattgttgctaatgttattggaattgtagattttctttacaagtattataaaaatagatttggtggcgagggaattgttgttaaggaaggttttggtataagtaaggttgagggtgatagaatgaagttttcgggtaatatttacagaatgttagagagaaaactctatcaaaaattccaaaattatggtcttgtgcctcctgtaaaaaacattacagaatttagaggcaaagacaacgcatttgtagaattcggaaatatttgctttattgattatagtggcacaagccaaaggtgtcctatttgcgaaaaaggaagattaaatcatacagaaacttgttctgaaaattgtggttttagttcaaagaacattatgcattcaaacgatggtattgcaggctacaatatcgcaaaaaaaggttttagagaaataacaaaaaaatag

SEQ ID NO: 194 - DNA, 3507 bp, Unknown
  Metagenome-Derived Sequence
  misc_feature (1)..(3507): Unk26 Csm1 gene
atggaaacctataagattaccaaaactatacgctttaaattagaagccgatgaagagaacagcatccacattaaagaagatattataaatattgaaacaaatgataatgaatttaccatggttgattttgtttctaatttgggcaattatatcaaagatctcaaaaactatctgttttatgaaaaaaaagatggttctttgtctttcaaagacaaaattatcattaaaaacgaatggctgcgtcaatatgcaaagcaagactttgttgagctaaagtcaaaaaaacgaattaatttaagaaataaccgcatggaacaaatcaaaattggcgatattccaagattatcatcaaaaattgaagaagctcttgacatagctaaggaaatttattcaaaactttctgacgacgcaactttagaacaacatgaaaggacaaaaaaagcacaaatcggactattattgaaacgtttagaagcaaaaaatgtactccccttattaatggatcttgtaaaagaaacattagacaaagacgagactgatgatttaagcataaggcttaagagacaatcacaaaaaattaacagtcaattaaaaatcgctattcggtcgtttttgcctgaacaatccaacggtttgcagattgcaaaagcaagttttaattattataccatcaacaaaaaaccgattgattttgaaaagaagatagaggatttgaaaaaaaatctaaatgttaaagatttagaaaaactcaacgtatatttcgacaagaaagagaaaaaacaaaaaaactatcttggaaaaaaaatatttagtttgtttgaaaccgatattcaaaaagcgctatcaaaaaaccaaccactttatctcggcgatgctccgatgattgattccgcttatgtcagtctgcggcaaatttttaaaaaaataaaatcagaacagaaaaaacaattttcagaattgatgcaaaataaatgttcttatgatgaattaaaaaacagcaatttatatctattgaatgatataggtttggaacaatttaatacttacagagaaaaaaccaaagaattggaagaacttgcaacaaaattaagcaatcaaaatctactagaaaacgcgaaagaaagattaagaagccaaaaagagaaaattgcaaaagaacgcggcaatattatgaaggacagatttcaaacatggaaatcttttgccaatttctaccgaactgtttcccaaaaacatggcaaaattcttgctcaactcaaaggaattgaaaaagaacaagctgaatcacaattgctgaaatactgggcattgatttgtgaaaaagaaaatcaacatcaactttggcttatccccagagaaaaagcatgggaatgtaaacggtggttagaaacagtgaatgatacatccatagacaatgagaacagtatcaaattatattggttcgagtcactaacataccgcagtctgcaaaaactttgctttggatttttagaaaatggaaataatgagtttaatcaaaacatcaaagatttgctgccaaaagacagaataggtaacaccattaatggagaatttgcctttgaaggagatgaagaacgaaagattgaattctacaaaacagttcttaattcaaaatacgccaaacaagtactgaatattccctttaagcaagttgaagaagaaattatctcgcaatcctttgagaacttgagcgattttcaaattgcactggaaaaaatatgctaccgtcgttttgcaatttattcaaactatataataagtttcgatgcacaaatttttgacatcacatcgttagatttaaaaaacaacgaaaaaaacaatctcaacacccacacgcatatttggagagacttttggaaagatgaaaatgaaaagaataactttgacattcgtttgaatccggaaattacgatttcatatcgtacacctaaacaaagcaggattgaaaaatatggagaaaaaactaaagaatacgacccaaacaaaaataatcggtatttgcatccgcagtttactttaattactacaatttcagaacgatctaattcgcaaactaaaaccctttcatttattgaagatgaagattttaaaaagtcaataaacgagtttaacaagaaactcaaaaaagataatattaaatttgcttttggtatcgataatggagaagtggaactttctacacttggagtttatttgccaacatttgaaaaagaaacccatgaagaaaaaatttacgaactgaaacagataaaaaaatatggttttgaggttttaaccattactgatttaaagtacaaagagactgattacaacggaaatgtaagaaaaataattcaaaatccatcctattttctgaaaaaggaaaactatatacgaacattcagcaaatccgaacaggaatatgaggaaatgttcgccaaactgtttaaaaaagaacatgtactcagtttggatctgacaactgcaaaaatgatttgcggacatatcgttaccaatggcgatgttcccgctctgttcaatttatggcttaaacatgcgcaaagaaatgtttttgaaatgaacgaccatacagtcaaagaaacagcaaagacaatcagacttagaaataatgaagagttgacggataatgagaaagaaaaatttgcagagtttatttcagatggtaaaaaatttgccaaattgaccaaggaagggaagaaatcaaggtatctaaaatggatttttgaagatcggaaagaaaatagttttaccgaagatgaaaataaaaaattcaatgactgtcagaaaaaaaaaggaaaatacaattcacatatcatttttgcatcccgttttgagggagatgaattgaaaagcgtgactccaatttttgattgccggcatgttttcaaaaaacggaaggaattcgaaacaattagaccaatcaaagaaatcgaaaatgaaataagcagattcaacactaatcgtacaagtcacaacatttcaaacgaagaattggatttaaaaattacagatgccaaaaaggcgcttgttgcaaacgcgattggcgtcatagattttctttataaacaatataaacaacgttttaacgatgaaggattgataataaaggaaggatttgatacccaaaaagtagaagaagatatagaaaaattcagcggaaatatttaccgaattttggagcgtaagctttatcaaaaatttcaaaactatggcttagttccgccaattaaaaatttgatggcagtaagaaacgaaggcattaaagacaaaaatgccattttgcgtttgggaaatattgcttttattgatccttcaggtacaagccaagaatgtccggtttgtaaagaaaaaagcaaagaaaaacatactaataattttatctgcgaatgcggatttaattctactaacattatgcactcaaatgacggtattgctggattcaatattgcgaaacgcggattcgaaaattttatcaatgaaaaatag

SEQ ID NO: 195 - DNA, 3516 bp, Unknown
  Metagenome-Derived Sequence
  misc_feature (1)..(3516): Unk27 Csm1 gene
atggaaacttataaaataacaaagacaattcgcttcaaattagaagcaaaggacgaaaatattccggaaattcaaaaagatattgccggtttagataacaattttgatttggctaactttcttacgggtctgaatcattatattaatgatattgataaatatttgtttgaaaagaaaaaaaatggcaattctgtcataaatggtaaaataacaataaaacctgattttttgaaaaactatgcaaaacaagaatgggttaatttccaagaaaaaaataaattgacacaaaacgctactcaaaacagcagaccgcgtaaagaacgaaattctattaatgaatttaccggtttagatgaaaaaattaaacaaacattcaaggaagttgctgatatttacgaaacacttgcaaacgatgcaagcgccggacttaacgaaagagcaaaaagagaacataccggattacttcttaaacgattgcaagcaaagaatacgcttccatatttgatttctcttgctgaaaattccaataataaaaacgaaacagatgatttaagtatccaacttaaaaatcaatcatcgaaattagaacagcaattagcggcaggtattcgggaatttttacccgctcaatcaagcggtttgcctgttgccaaagcaagttttaattattatacgattaataaagcaccaattgattttatcaaaagaatagaagaattgaaaaaaaatttgaaagttgatgatttgcaaaaacttaattcattttttgataagaaatctaaaaagaataaactgtattttcatgataatctgttcaaattgattcaaaccgatgtgcaagagcaattaaaaaacaataagattcttttacttggcgatacttctatgcttgatattgaaaattacatcagcttgcgacaagttttaaaaaatataaaatcaactcagaagaaaaaattttcagaatggatgcaaacagacaaaaattatgatgatttaaagaaaacagaattgtatttgtttaaaaatatctctctcgaccaatttattgactatagggaaaagacaaaagaattagaagaattagctgtaaaaatcaatcaggcggcaaacggtgaagaaaggaaatctttaataagtaaaaaggaggctgtcgcaaaaataagaggtaatataatgaaagataaatttgaagcttggaaaagttttgcaaatttttaccgttctatcgctcaaaaacacggcagaattttagcacaattaaaaggcatagaaaaagaacaaacagaatcacaattgctgaaatattgggcactggttttagaaagtaacaatcagcataaactcgttttaattccaagagaaaatagcggagaatgtaaaaaatggttagaagaaaatgacaaccgctcgtcccctggctctcgtcacatattttggtttgaaagttttacttatagaagtttacaaaaattatgttttggaaatcttgaaagcggaacaaacacttttaataaaacaattcaaaatttattactcaaatattctaaaggcaaacctataaatggtgaatttgcttttgaaggtgatgaacagaaaaaaattaaattctataaagatgttttacaaaatcaaactacgcttaacttgccgcaagaaaaagttcagatggaaatcataaataagaattttgcaagtttaggagactttcaaattgctctcgaaaaaatttgttaccgtcgatttatagttcttaattcagatgcagaaaaaatacttttaaataaattctatgcgcaaatttttgatattatttcgttagatttaaaaaatttagaaattatcaataataaacaagaaaaatatttgcacaacgacaaacgtcatacacaaatttggaaagaattttggacaagcaaaaatgaagaaaacagctttgacattcggctgaatcctgaaattataattacttatcgtcaacccaaacaaagtagaatcgacaaatatggtcagaacagcaaattaagtaaccgttatctgcatcctcaatttacgcttattacaacaatttctgaacactctaattcaccgacaagaatattatcctttgttacagatgaagaatttaaaaattctgttgatgagtttaacaaaaaacttaaaaaggacaacataaaatttgcttttggaattgataacggcgaaaaagaactctctacacttgtggtttacttgccggaattttccaaaagaaccccagaagaaaaaattgccgaactgaaacaaattgaaaaatacggctttgaggttttaaccattaatgacttaaactacaaagaaagcgattacaacggcaaagaacgaaaaataattcaaaatccatcctatttcctgaagaaagaaaactatatgcggacgtttgacaaatcggaacgggagtacgatgaaatgtttgagaaactatttaagaaaaaacgtactctcacattgaatttgacgacggcgaaggtaatttgcggacatatcgttactaatggcgatgtaccagctttatttaacctgtggctcaagcatgctcaacgcaacatttttgaaatgaacgaccatatcaaagatgaaacggcaaagagaataattttgaaaaacaaattagacaccaacaaagaaaaactaaaatttgcagaatatatttctcataaagaaaagtttgacgaattttcagaagtagaacaagaaaagtatgtccattggatttttgaagacagagagaaactcgacttcactaccaaggaaaatagtaaattcaatgactgcacaaagagaaaaggggattatagaaccgatattctttttgcctcctgttttattggtgatgaattacgaagtgtaaccgatatttttgattgcagacatattttcaaaaagcacgacgaattctattcaatcaaatcagagaaagagattgcggcagaaattgaaagttttaacaccaacagaacaagccatgacatttcaaacgaagaattagatttaaaaattgtagatgccaaaaaagcgcttgttgccaatgctgttggagtaattgactttctttacaaaaaatacaaagaacgctttaatggagaagggttaattgtgaaagaagggtttggtacaagggaagttgaacaaggtatagagaaattttcaggaaatatttacaggattttagaaagaaaactctatcagaaattccaaaattacgggcttgtaccaccgataaaatctctaatggcgatacgcagtgaaggcttgaaagggaataaaaaagcaattttacaacttggaaatgtttgttttatagccccggacgggacaagtcaaaattgcccgatctgtgagacaaaaatgaataataatcacgcagatgaaatagtttgtaaggtatgtggttttgaaagcaaaaacattatgcattctaacgatgaaatcgccggatttaacatcgcaaaacgcggctttgaaaattttaactaa

SEQ ID NO: 196 - DNA, 3516 bp, Unknown; identical to SEQ ID NO: 183
  Metagenome-Derived Sequence
  misc_feature (1)..(3516): Unk28 Csm1 gene

SEQ ID NO: 197 - DNA, 3564 bp, Unknown
  Metagenome-Derived Sequence
  misc_feature (1)..(3564): Unk29 Csm1 gene
atggagaagtacaaaataacaaagacgattcgttttcggttagatgcggataatactgcgatatctgcaattgtaaaggatacggaggcgcttgaagcgagggggcaggggttcaaaataaaaaaatttgttaatgcgttgggaagatttttgagcggcgatggtgttcagaagtatctgtatgatatgagcaatgaggaaaattgcgtttttaagagaaatttggtgataaagaatacatggctaaaaaacaatgcgaaacaggagattgcaggcatggatctcaaacggggccttattatcaaagacattaaaggtttgcaggataaaattgaagagatatacgataaattatgggaaatttatgaaatattatatgaatcggcatatcttccgctgcaagatttggcgcggcgggagggtatcggacttttgcttaaaaaactcagcgtaaaaaacgcgcttccgttcataatctcttttgttgaggagtccaatgataaaaatgaagcggacgatttgagcttgcggctaaaaaagcagggaaaagagattctaacgcaattggaaatcggtattaacgagtatctgcctgctcagtcaagcgggctgccggttgccaaagcgagctttaactattacactataaataaaaccccggttgattttggtgagaagatacaagaactggaaaaacgtctatcagtggatataaaaaaggaaatcagcagttttacaggcgggatcaaaactgcaattaaaaataaaattgccggcaagaaaattttgcttggcgatacgccgatgtttgaaagtgaaaattccgtaagtctgcggcagatattaaagaacataaaaagcgaacaaaaagcgcagttcaataaatttatgacaacgcagaataatccgcagcttgaggagatgaagacaatggggtggtatctttttggggatataaccgaaggtgaatttaacgattataaagagcaaaccaaagagattgagagagtaggggcaaagataaatcagtgcggtaatatcaaagaaaaaaaagagctgcggtctcagttgcagaagctcaaaaaaaagcgcggtgaattgataagcgaggcgcacaaaaaaggcggcaacgataagaattttaagacatacaaagaatttgctaagttctaccgcaagattgcgcaaaggcacggaaaaatcctcgcgcaaataaaaggaatcgaaaaagagaaaatcgattcggccatgctcaattattgggcggcggttattgaactaagcggacggcacaagctcgttttgattccaaagaaggatgagaatgcaaaaaagtgcatagagtggttagaagatgaaagtaagcataaaaacgggtcgtgcaagattttttggtttgaatcatttacctttagaagtctgcaaaaattatgcttcggaaatcttgacagtgggacaaatacttttaatcaaaaaattcaaaatttgttgccgtgtgatgaacgcgggaatctcatgaatggagagtttgcatttaagggtgatgaacaggaaaaaattaaattttataaaaaggttttacagagccaaaaagatataaatctgccgcaaaaagaggtcgttgataatgttgttggcagaaaatttgaaactatggatgaattcaaaatagctttggaagagatttgttacattcgccgcgaaagactcagcgcaaatgcagaatcagagctcaaaagtaaatttaacgctcaaatttttgatatcacatcgcttgacctgagaaatccggtaaactgtgccggaaaacctgaggtttatcatcacaatgacaagaggcacacagagatttggaaagagttttggtcacttgacaatgaacgccgcaattttaatatccgcctgaatcctgaaattaccataacataccgcaaacccaaagagagccgtatcttaaaatatggcaagggtacagaaaaatataacgccgatatgaagaaccgctatctctatccgcaatatacgcttctcacaacaataagcgagcactgcaacacgccaactaagattttgtcgtttatgactgataacgagtacgaagagtcaattaaagcgtttaacagtaagctcaaaaaagaggatattaaatttgcctttggcatagacagcggcgaaacagagctttccacgcttggggtctatctgcccgaatttagcgctgagagcacagagttaaaagacattgaaaaatatgggtttaatgttttgactatcaaggatttgaattatacagaaacggattataacggcagcgataaaaagatagttaaaaatccatcgtactttgttgacaagagtctttatatgcgcacttttaaaaagacggagcaggagtatgagaaaatgtttgcggagcaatttgaggcaaaaaaacggctgtcattagatttgagcgccgcaaaagtgatctgcggacatattgtaaccaatggcggcgtttctgaacactttggcctgtggcttaaacatgcgcagcgaaccattttttggatgaatgatcatacggaaaaaaagacagcaaaaaatattaaattgaaagacagcagcgaattgacgtatgatgaaagggagaaatttgcagaacatatttcaagcgatgaaaaatttaaaaaacttgatgtagaagaaaagaagagatatgtccggtggatttttgaggacagagagactcttaattttacggaggctgagaataaaaaattcggcggatatcaaaagaaaaagggagattacagattagggattttgtttgcgtcatgttttatcggcaaagaattagagagcgtgacccaaatattagactgccgtcacatcttcaaaaaacgtgaagagttttactctctcaaatcgaaagaagatattgaagcggaaattaaacgttacaatacggattatacaaatcataatatttcaaccgaacagttggatttgaagtttgttaacgtgaaaaacgcgcttgtggctaatgccgttggcgttattgacctgctctataagcagtacaaagagcgtttgggcggtgaagggcttattgctaaagaagggtttgacacaaaaaaggtagaggaggatatggaaaaattcagcggcaatatttaccgcattttagagcggaagctttatcagaagttccaaaattatgggcttgttccgccgataaagaatttgatggcggtgagggctgataaggttgaaatatcggaagcggaaaaatcaaaaataagagaaaattgcaaaataagtaaaattgatcctgaaaatgaaataataaaaagaaacaaaaccctgatattacgcttgggcagtatcgcatttgttaatgacgctgatacaagccaggagtgtccggcttgcggaacaaaaagcaaagaaaaacatgttgataactttatttgcgggtgcggatttaattctaccggcattatacattcaaatgacggtgttgccggatttaacatcgcaaaacgtggatttgttaaccttatggaacacgaactacggtaa

SEQ ID NO: 198 - DNA, 3573 bp, Unknown
  Metagenome-Derived Sequence
  misc_feature (1)..(3573): Unk30 Csm1 gene
atggagagttataagactacgaaggcggttcgtttcaggttggaggcggatgacgcggcggcgcctttggttgcgggtgaggttgcggcgttgacggcggtggggcagggttttaagataaggcgctttattaatcgcctgggggagtttttgggtgagggagttcaggaatatctgtacgacgcggaggggaaggtcaaggataatctggcggtaaagaatacatggctcaagagcaacgccaaaagggagattgccggtatgatcgccggtatgaaactccggcgcgggcttgccgtcaaggacattaaggggttgcgggagagcatagagaaagtttttaacgacgtttgggatacctacgaaaagctgttttcatccgtggacttgcccctgcacgatttggcgaagcgggcggccatagggcttctgctcaaaaggcttcaggtaaagagcgcgcttccgtatctgatttcttttgtggaggactccagcgacaaaaatgaaaccggcgacctgagtttgcgcctgaaaaggcaggcgaaagatattttggagcagttagaggccggggtttacgagtatctgccgccgcagtcgggcggcctggaggtcgccagggcgagtttcaatttctacaccataaacaagaagcctgttgatttcgggaaagaaacggaaaagttgaataacagcctgatagtgagcgcggaggagaaggttcatcgcgggattaatgtttcaaaggaggttaagtcggctattgtaaacgatattttggatcgttcaagcggcaaaaagattctgctcggcgacgcgccggagcatgacggcgaaggctgcgtgagcctgcggcagatattgaaaaacataaaaagcgagcaaaaggcggcgttcaacgaatttatgacgcagaatccgcagtttgaagcgttgaaaggcaagggctggtatcttttttcggacattacggaaaatgagtttgatgactacagaaaacagacaaaagaaattgaacgtgtggcgacgcagaaaaatcagtgtgaacgcggcgataaaaagaaacttttgcagtctgatttgcaaaaattaaaaaaacagcgcggagcgctgataaacgcggcaaataaaaagggcggtaacgagaataatttcaaaacctacaaggcgttcgctgatttttaccgcaaaattgccatggatcacgggaaaatccttgcgcggctgaaagggatagagagggagcgggtcgaatctgccacgcttaaatactgggcggtggttgccgaagttaataacaggcataagctggttttaatcccaagggaaaacgccggggcgtgcagggtatggctggacggcggcgggcataggaacggagcgtttaaaattttctggtttgagtcgtttacgttcaggagcctgcgaaagctatgcttcggctttgttgaaaacgagacgaagtcgaacacgttttacgacgagtggaagaaggaattgaccgattaccggaatgtttcgagcgaaattgacttaaacgtaacgccgggtgacagaaaaggatacacagaagaagagttgaggcagaatgagcagagaaagattaaattttacaaggctgttttggggagcggctgcgcgaagcggtcgctgaatatcccgacggaacaggtaagaaaggagattgtcaacagggaattcaaaaacctggacgaattccaaatcgccctcgaaaaaatctgctatctccgcttcgcaacgctctccgctaacgcggaggcggagttgaaaaaatacaacgcccagattttcgacattacctcgcttgacctgaaaaacccggagagcgcggcgggcaaggcggaaaaatacgaacattccgacaagcgccacacaaaaatctggaaagagttctggacggccgaaaacgagaacgccgggtttgaaatccggctgaaccccgaaatcaaaatactgtaccgccggccgaaacaaagcagggtaaacaagtacggcgagggtacggaacggtacaacccgaacaggaaaaaccgttatctgcgtccgcagtacacgctggttacaacaataagcgagcacagcaattcgcccgcaaaagaggtatcttttgtaagcgaaaaagagtatacggatttgatagatgaatttaacgggagattcaagaaagaggacataaaattcgcgttcggcatcgacaacggggaaacggagctttccacgctcggcgtttatctgccggcgttcaagaaagatacgaaagaggaaagactcgctgaactgagcaatgttgaaaaatacggatttgacgttttggctatcggtgatttaaactataaggaaaacgattgcaacggcaaagagaggaaaattgttcaaaacccgtcgtatttcctcaacaaagacctgtatatgcggacgttcaacaaaactgaggcggaatacggggagatgttcgcgcggcagttcgaggaaaaacgcctgctcacgctggatttgaccacggcaaaggtagtctgcgggcgcatagtaacgaacggcgacgttccggcgctgctcaacctgtggcttaagcatgcccaaagaaacatctttgagatgaacgaccacattaaagacaaaaccgggaaaaaaatcctgctgaaggacaaactcgatacggataacgaaaaacggaaattcgccggatatatttcgcataaggatgaattcgataaactcagcggcgaggaaaaggcgaggtacgtccaatggatttttgaagacagggattcgctcaatttcacgaagggcgaggaaaataaattcgagaggtgccaggagaagaaaggggattacaggtccggcgttcttttcgctgcctcctacaccggcgtcgatttgcagagcgtgaccgatattttcgactgccgccacgtttttaaaaggcgcggggagttttactcgattaagcctgaacgggagattaaacaggaaattgacagcttcaacactaaccggacaagccacgccatctcgaacgaagagcttgacctgagaatcgtacatgtaaagtcggcgcttgccgccaacgcggtcggggttattgatttcctctacaggcagtacagggaacgttttggtggcgaggggttgattgtgaaagaggggttcgatacaaagaaggtagaggaggacatggaaaaattcagcggtaatatctaccggattttagaaagaaggctttacagaaaattccagaactacgggcttgtcccgccgataaaaaacctgatggcggtgagggcggaggggatgagggcggatgagaaaaacagcaagcccgacctcggcgcaatagtgaggcttggaaacatcggcttcgtcaatgagacctacacgagccaagagtgccctgtctgcggcggaaatttgaaccacgaaaaggtctgcccgaaaaattgcggctttaatgacaaacggttcatgcactcaaacgacggcattgccgggttcaacatcgcaaagcgcgggtttgaaaattttctcaatgagaaacatgggggagcgcaatga

SEQ ID NO: 199 - DNA, 3585 bp, Unknown
  Metagenome-Derived Sequence
  misc_feature (1)..(3585): Unk31 Csm1 gene
atggagagttacaaaatcacaaaggctattcgttttaagttagaagccgatgaaaaagctattcccgccgttatgcgggatatttccgcgctcaggaagacgggcgacggggcggatatcaaagcttttgccgaagagttgtatgaattgctgggctatattcatgattatttgtacgacgaaaaaaatgatgatgattatatctttaagagaggattaacggtaaagaacacgtggctgagagacaacgctaaagacgagacctccggccaaacgcttaaacgcggcctcaccatcggggatattaaggggaaggactccagaggcagcgatttacaggaaaacatcgaaaaaattttcgatgaggtcgttgatatccacgaacggctggaatcggcgataaattctccgcttcaatcattgccccgacgggcgagcataggccttttactcaaaggattggccagaaaacgcgcgcttccgtatctgatctcctttctggaaggctccgatgacaaagatgagaaaagcagcgtaagcctgatcgccaaaaagcgggcaaagatcgttacggacggcttggagcgctgtatacggcattacctgccggcgcaatcgcacggactgccggtggctaaggccagctttaattattataccgttaacaaaaaagagattgactacaagggcacgatagaaaaattaaaaaaagacctgaaagtaggtagcttgaaagaggatctgaacaggatttttgataatctgaaagcgtctataagcaaggaggtaaaaacagaattattgaatgacatctcctcgcgtttaagcaacggctccgagttgtttttagggtacgccccggcggctggaatagaaaacggcaactatctccggcagattctgaaaaacataaaaagcgagcaaaaagccgcctttaacgagtttatgactcaaaacccgtcgataggcgctattaaagataaaaaactgtacctgtttagcgatatatccgaaggcgagtttaacgcctataagaagctgaccgccggcatcggtgacgcggccgctaagataaatcaggctagaaacgacggcgacaaacaacgcctgcggtcggagttgaataaacgcaagaaagagagaggcgaactgataaacgcggcgaacagaaggaacggcaacgagaataatttcaaaacgtataaagcgtttgccgaagtttaccgcaaaatagcccaaaggcacggcaaaatcctcgcccagctcaaaggaatagagagggagaggattgagtatgacatgctcaaatattgggcggtgattattgagctgggcggcaggcataaactcgttttgattcctgaaaagagagccgaagagtgtaaaaaatggttggaaacatcggacgaaagcaaccgtaaaaacggaagcgtctgctggttcgagtcatttacgctgaggagccttaaaaagctatgtttcggaaatctagacagcgggtcgaacttatttaactcaacaatcagacccctgttgcccaaagaccgaagaggcgaagccatgaacggcgatttcgccttcgcgaaaagcgcggcggaacgtatgcccgaagcgtccgagcaggatatcttgaaagaagcggaaagcgaaaagataaagttttataaaaacgtcctcaaagggcaaaaggcgcttaataacctgccggaagaggaaatccaaacagaaatagtaaaaaaagattttaacagcttagaggcgtttcagatcgcgctggaaaaaatttgctatcgcgtcttttattcgctgtcggcaaacgcggaacaagaactcaaggacaaacacggcgcccaaatctttgagattacctccctagacctcaaaaacccggagaatgtaaaagataaacaagagaaatacgcgcacgccgataagcgccatacgcgaatctggaaggatttttggacggcaggcaacgaaaaaggccgtttcgacacacgcctaaacccggagatcacgattacctaccgggaacccaagcaaagcagggtcgataaatacgggaaggggtcggcaaactacgacgccggtaagaaaaaccgctatctgcacccgcagtttacgctgacagcgaccgtctccgaacactccaactccccggcgaaaacgctctcgtttatgaccgacaaggagtttaaagagagcgttgacgatttcaacaagaaattcaaaaaagatgatataaaattcgcgttgggcatagacaacggcgagacggaactctccacgctcggagtttacctgccggcgttcggcaaaggcgccgcaaccgaagaaaagatcgccgagctgaaacaaatcgaaaaacacggctttaaggttttaaccgtaaaggacttgaattacaaagaaacggaccgcaacggcaaagagagaaagattgttcaaaacccgtcgtacttcttgagcaaagaaaattatacgcgtacgtttaaaaagtcggcggaagagtatgaaaagatgctagccggcgtgtttgaggaaaagcgcatcctcacattggacctgacgacggccaaagtgatttgcggccatatcgtaaccaacggagacgttccggcgctctacggactgtggcttaaacacgcccagaggaccgtctttgagatgaacgaccacggcaaagccaagacagccaaagacataaagataaagccgaaattggacacggataaggaaaaactgaaattcgccgagcacatctctaagattaaagagttccgcggccttaccgcggaagaaaaggcaaaatacgtcaagtggatatttgaagacaggaagcccggcgatttcacggataaagaagcggaaacgttctcggactgcctgaagaaaaaaggggactatcgctccgggatagttttcgcgtcttgctatgtgggcgaagaactgaagagcgtgacggaaatcctcaactgccggcatattttcaagaaacgcgaggagttttattcgattgactccgaagaggagattacggcgaaacttgagggctacaacaccgatagaacaagccacaatatctcaaacgaggagttggatttgaaaattacagacgccaaacgagccctagtggccaacgcggtcggcgtcgtcgattttctttacaaatactacaaacaaaacagcggcggagagggattggttgtaaaagaggcgttcgatgccaaaaaagttgaggaagacatagagaaattcagtggaaatatctataggatattggagagaaaactctaccagaaattccaaaattacggcctagtgccgcccataaagtccctgctggccgtgagaggcgaaaaagaagaactgcgcttgggcaacgtctcattcgtcaaagaagagggaacaagccagagatgccccgtttgcggggctaaaagcgatgaaaaacataccgatcggttaaaatgccaaaaatgcggatttgactcgtacggcatcatgcacagaaacgacggcatagccgggtttaacatcgcgaagcgcgggttcgagaattttatgaaagaggagcgcaaatga

SEQ ID NO: 200 - DNA, 3630 bp, Unknown
  Metagenome-Derived Seqence
  misc_feature (1)..(3630): Unk32 Csm1 gene; TGA encodes Gly
atgttagaaagttttaaagatttgtatgaggtgaggaaaacagttaggtttgaattaaagcctagtaaggtacttcctaaaataaaaattaaaaatatagatgaaaactttatcaatgaattcttttctaattataataagttattagaaatttatgaaaaagtattttttaataatagagaaattaacgggaaaataaagtttagtttctcttttctaaagacaaacttaaaaaaagaatattatgagctttgaattgacaaaataaaaaagtcagcctctgttaacaaaataaaattagaaaaaatagacaattatgagaaattaaatagttcatttttatctacattaaaaaaacaaaatgaatatgtaaattcttttaaagaaaaaatagaaagtccttatgagaataggagtagaaaatcagagttagttttattaatatataatctaaaaaagagaaataatttccctttcattgagaacgcatttaataatgtaacagcagaaaacataatggttgatgatgaaataaaaaaatgaaacatgttagccaaaactatttccaatcaattagtaactattgaagaggaactattacctcaaaattcaatgtgattagtaattgaaagagcaactttcaactattttacaattaacaaaacacctatagattatgatatagccataaaaaacaaaaaaaataaatataatgagattatatgaaagcaaaataaattaaaaaatacgtacaaaaaacaatctataaatgaatttataaaatatattatagaggatggctttagtaaatttgagaatcaaatatatgaacaaaatgggaaatatattgatacagggagaaaatgaagttcttttaacgaattaactatagaaaatgcttatacattaatgaaaaaatataaatctgaccaaaaaacagctttttatgaaataataaaaaaagagaaatataattttttaaaatcacaaaataataaaataacaattacatataacaaagatagctttaatgataaaaaagaagaaataactgtaaaactttttaatgatataagtaagtgaaattttgataaaattgcaatgttaacaaaaaagatagaaactcttgctgagcttaaaaattatttagagaaaaaagaatttaataaatttcaagaaaaaataaatactttacaagaaataataaatattaattttaataatgataatgaggaagaagtagaaaatctagtaaaaagacttaatgctgatagagttttattaaaaaaagaaagatgaacttattttgataaggaatctaacaactttgcttttacaaagtacaaagaattttgtgaagtatatcaagaagttgctatgaccttatgaaaagcaaaagcagatataaaatctttagaaaaagaaaaaattcaatctttatttttaaaatcttgggctcttatagtagaaaataaagaaaaaaatcaattccaccttttaactatacctaaaaagaacatatcaaaagcaagaaatattatattggcacttaaaaattgagagaataacaataatatattatatctttttgaatcattaacattgagagcattaaaaaaactatgtttttgaaaagaattttctgaaaatagaggagattatacagagaaaagttcaccctttagaaaaagcattgaagaaaatattactaatagtgattttgataacataaatttttatatagaaaaacaaaaaaaagatggaaacaattatagagtactaaagcaatattatgatttttacataaataaagaagaaaacaaagaattagatgaagaattgctaattaaattttataaatcagtgttacaactaccaagcacacttgagcaaataattattaaaaacttccctgactatgaaagtttcatatctaaagaatttaataacttagaagaattcgaagaaggtataaaaagaactttctatataaaacaacctcttaaaatagaagaacacaaattaaataaattaataaaagaatacaattggaatttatataagataactaattataatttaataaaaaatgatttagatgaaataaaggaattaaaagaaaaagaaaggtttaacagaaaccatataaaaaatcattctaaattatggtggaatttttgggaaaaagagaatatagacaataaataccctataagaattaaccctgaaattgctattagcttcgttaaaaaagatgataatttttatgaagaaaatcataacaaactttttaaaaacagaagatttcaagatagatttctattaacaacaagcatgacagaatttgcaacaaataagtcaatttatttaagctacaaagagttaagtgaactaaaaaatttttataattcatataattataatttttcagagaattttaagtgagaatacatttattgaatagataggtgagataatgaattagcatctctatgattatttagaaatataaacaaaaatatagaagcagtaaaaatagaaacatataaattaaaaaatgaaaatttactttttaaagagtgaacaagtaatactcctgcttataaaaatatttcaaattatattgaaaaggatgagttatttgaaataaaagaagtttcttgcatagatttaactttagcgaagttaataaagtgaaaaattgttttaaactgagacatatcaacatatattaatttaaaaattactgcagctaaaagaagtttatataatatattttctaaatgaaattataaagaatgagatataatagaaaaatgaaaatttaaagacaaaaatactggagaggaatgatatgattgaactcttaagtttaaccaaaaagaaatatataaaaataatagtgaaattgaaaaaattatatcaattgataaggtaaaaaatatactagaggaatatattgaagaaattaagcaaaatatttataatgaagacatttctattgaaaaaattaatcatttaagagattcaatatgttcaaatatgattggtataataaatttcttacaagaaaaatacagttgatatatgtttttagaaaacaaaaaaataattgactcgaacaaaaactttctaaaagattgataccaacttggaacaagatttgaacaaaaattgctacaaaaattttcaaatttaaacttagtaccttcaaattataaattatttttatcaataagagatgaagataaagaaataaagcaattatgaataattagatatatagatgagaattcaacttcttctgcttgtcctgtttgtaatcctaaattatataatgtaaacagtgatgatataaataaattatattgacattgaaaatgagaagagaaagaaaaatcaatgcatcatatcaatgataaaaatgatgaaaaccatcaagaatgaaaatgggaatcttgaaaactagaaagctgagatttatgtgatttccatatttgatataatgaaaagtatcctgattttagtttcatcaagtcttgagacgacctagcaacctacaacatcgcaaaaaaagccttggaatatttagaatacctaaaatcactaaacaacgatgaaacaaaataa

SEQ ID NO: 201 - DNA, 3774 bp, Unknown
  Metagenome-Derived Sequence
  misc_feature (1)..(3774): Unk33 Csm1 gene
atggacgcagacaagaccaccaaagccattaacgaatatcaaacacaaaaaaccattagatttgggttaactgctacaaaccaaaatctgtattctgaagaaatcatgaaattattgaatatttcagaagaaagaataataaaagaaaaagtaaaagtaaataatgataccgataaaaccaatcaattaagaggttgtttggttcaaataaaaaaatatctgaaaacttgggaaaatatttatgcacaaattgattttttggcaattacaaaagattattataaggtaatttcaaaaaaagcgaggtttgattttgacaaaggcaacggttctgaaataaaattatcttccttacaatcaactcataacaaaaagaaacgctatcagtacattatagatttttggaaagaaaatttgcgcaaaacagaaaatttatatcggaagtcagacgatttgctgaaaatatttgaggaagccaaaaatcaaaatcgtgatgacaaaaaattgaataaagtagaattgcgaaaaacttttttaaatttgtttactcttgtaaatgaaagtttgaagccattaattgaagggaatctgtttattgtaaatgacgataaaattgatgaaaaaaactcaaaacataattatgtgttctatttcatttcaaaaactgaagaaagaagactgttgtatgacaatatctgtacattgcaggattatttcaaaaataatggaggttacgtgccatttggtagggtaacattaaataaatggacggctttgcaaaaatttaataatagagatatagaaatcaatagaattattaaggaattaaagattaataatatttctacgcaaaagactgattataaatataatgactttactgaaaattttaaagaaaagaaagatgaaaatggtaaagttgttaaaaacagtgctggtaatattatctgggatttaaaagctaatgccaaatctgttatcgaaatctgccaatttttcaagtataaaaaagtaccaataaacgcccgcttaaatcttgcaaaaagattgataaaagacaacaaattaaaaaaagaacaagaaaatacgtttttaagtgagtttggtgtgttaaaaacgcctgcttttgattatgcaagagacaaagaaaactttaatctcacaaattatccgctaaaagttgcctttgattacgcctgggaaaattgcgcaaaagacaaatacgaaaagattccttttcccaaggagcaatgtgagagatacctgcaaaccgcttttgaaatagatgcgactaaagacgaaaataaaaaattgatagatacacatttgaataaatatgcagatttactacaattcaaaattttactcgaaagatttaaagcagaatttcataaaacaaacgaagaaacaaataaaaacaacattcaaaaattgagaaatgtttttagcggtttagattaccatggagacaataggttaaataaaaatcagattcaaaaagcaatcgaagcttggtttgacaacaaagagcagaacattggaaaaaagaaagaaaatgaaaaacttttaacagagaatgaaaaaaacaacttttccttatccatgcaaattatcgggcaagagagaggcggattaaaaaacggaattccaaaatacaaagaattaacggaaatgtttaaggtctgtgcttcaaaatttggaaaacaatttgccgacttgcgagattatttcaatgaagcgtatgaggttgataaaattaaataccgagcctggattattgaagatgacaaaaagaatcgttttgttttatttgtcaataaagaaaaagcgtttgacttaacttcagaagaaggtgatttatggttttacgaagtaaaaagcctgacttcaaaatcgctggtaaaattcataaaaaacagaggcgcttatccggattttcatgatgttaagaacagttttcattacagtagcataaagaaagattggcaaaactataaaaacgatccagagtttttagataaattaaaagaatgtctgaaaaattctaaaatagcaaaagaccaaaagtgggcgaagttttgttgggattttaagcaatgcgatacttacgaaaaattagaaaaagaagttgatagaaaaggatataaacttgaaggttgtaaatctgaaccaaaaacaatttcattaactcaacttacggattgggtcgaaaacaaagactgttttttgcttcctattgtaaaccaagacattaataaaggggacaaacgaactaaaaatcaaaaccagtttacaaaagattggtttgatatttttgaaaacaaaaagcgtttgcatcctgaatttaacatattctatcgcttcccaacaaaagattatccgaatacaaaatttaaaaatggaacagaaaaaacaaaacgatattctcgtttccagatgctggcttattttggttgtgaggttattccctctggcaatcatttaagcaaaaaggagcagattgcaatttttaataatgataaaaaacaaaaagaagaggtggaaaaatataacaaaagtatttcttcggattgtgactatgttataggaattgaccgaggaataaagcaacttgcaacgctttgtgttttagataaaaatggagtaattcagggcgatttccaaattttcacacggacttttaacaagcaaacaaagcaatgggaacacaaagaattagaacaacgcaatattttggatttatcaaatttacgggttgagacaacaattacaggtaaaaaagttttggtggatttaagcaaaataaaagacgatgaaggtaactataccaatctgaaacagacaattaaactcaaacaattggcttatatccgtgaattacaatatgctatgcaaacaagaccagacgatttgttagactttgtaaaaagtataaattctgctaatgatataactgcagagaatattaagcattttatttcgccatacaaagaagggaaaaattatgatgacttgccaaaagtagaaatgtttaatttgcttaaagagtgggggaatgctgatgaaaacggaaaacgaaaaatcgccgaacttgaccctgctgacaatttgaagtccgggattgttgctaatatggttggcgttgttgcatttctttgtgaaaactataactataaggtccgtattgctttggaggatttaacaagagcttatggtatccaaaaagacgcattaaatggaacagcaatttatcaaaacgatgaagattttaaggaacaggaaaatcgcagacttgccggcgtaggaacaatgcaattttttgaagttcaacttctaagaaaattatttaaaattcaagttgataaaaacttacatcttattcccgcatttcgaagcgtagataattatgaaaaaattgttcgtagagataaacagaatagtggcgatgagtttgtcaattatccgtttggaattgtttgttttgttgacccgaaatacacaagtcaacaatgtccatattgcaataatacgcataaacataagaaaaatgatacggaaacagggaaaaaagcattttatagaaataaaggagaaaacaaaaactctctattatgcgaaaaatgcggagtttcaacaattgaaggagaggaaacgctgagcagtaaaaatgataataaaaaacaatttaatattcactacattaccgacggagatcaaaatggagcgtatcatattgctaacaaggtagttataaactttcaaaaggattcataa

SEQ ID NO: 202 - DNA, 3831 bp, Unknown
  Metagenome-Derived Sequence
  misc_feature (1)..(3831): Unk34 Csm1 gene
atggaaaaaattaaaaacaaatatcaagtgtcaaaaacattgcgttttggattaacgcagaaagagaaacgccgtaaaaaaggtttcgttggagaagtgtatgaaagtcatacagaattgaaagatttgacagatttttcagtcaaaaaaatcagggcagaaatcaaacaaggcgggaactccggtattccaatagaaaaaatacgtcaatgtttgattgttattaggagatatatgaacttttgggaaaacatttattatcgatgcgaccagttgtctcttgataaagatttctacaaaaagctatcaaaaaaaatcggctttgaaggattttggcatgaggaaaataggaagacagatcacagaatcaaaaaacctcaggcaagaacaattcagttatctgaattgaacaaaaaagacgaccactataaagaacgtaaagattatatcgttgagttttgggaaagcaatataaacaaagctgccgagagatttaaggaaacggaaagtgtttttgaaaagtttgaaatagcaattaatgcgaaccgtgatgacaaccgtcccaatgaagttgagatgcgaaaaatgtttttatcacttgcaaatattatctatgaaacgcttgtgccgctatgtaacgggtcaatatctttcccgaatatagaaaagatgcagaataatgaagaaaataataacttgcgtaaatttgcggctgatgacgaatttagggcagggttgcttactcaaatagaagagttgaaagcatattttgaggaaaacggaggcaatgttcattattgcagggcaacgctaaatcccaaaaccgtaataaaaaatccaaattctaccgatagcagtatcgcagatgaagttgaaaaaacaggcattgaacgatacctgcaaaataaacaagaaattaagaacaaaatagaaaaaattaaagacaaaaatttaccactgattgagcgagcattattattcaaatataaaacggtgcctgccggcgttcagtttgacttggcgaagtttttatctgtaaaattgggtaaaaccgaacaagaattaagaacgattattcgttgtatcggacaaatacaaagccccgccgaggattatgcaaaatctgaagacaaaaaagggtttcatctggaacaatacccgttaaaatccgcgtttgatttcgcttgggaatctttagcaaaagcgatttatcataaaaatgttgatttcccgcaacagcaatgtaaagtgtttttggaaaaaaattttgacataaaaattgacagcaatgctaatttcaaactctacgcgcaacttttatatttgcgggaaaatttggcaactttggaacacagtaagccgacagatcccgacacttttgagaaaaatattagaaaattacttgacgagattaattggagcactatcgacaaagaaaaaggttcagtttataaaaacgcaatctctgattggttaaaaaacaaaaaagcaaaagatgaaaaattcggaaaagtgaaacaaagcatcggtttgtcccgcggtagattgaaaaataaaattaaaaaatttgatgatttaaccaaagactataaagatattgcaacgcagttaggcaatgcgtttgcggcaatgcgcgataaaatcaccaacgctgctgaactcaataagatttcacattacgcaactattattgaggataaaaacggcgacagatatattttgttacaaaaagtaacagagaatgaaaaacctgttggagaaaactggaataaaaacggcgaattaaaaacctatttggtaaattccgtcacatccgccgcaatcagcaaaatgattcgcaagataagaacggatgaattacgcaaaaacgaaaaaatgcaatcttcaatcactaaattaaacgaaaagcaaaaggaagaaaaaaacataaatgattggaaaaattttattgaagaaaagagatgggatttagaattcaaattagacttgaaaagcaaaaactttgagcaaatcaaaaaggaaatagacacaaaatgctatctctttaacacaggatacgccagtcaagcagatatcaaacagttagtaaaagaaaaagacgctttgttgctgcctattattaatcaggatttggcaagcaaagataaaattgtacgaaatcaattctccaaagattggcagatgatattttctgacaactcgcaaggttatcgtcttacacctgaatttagaatctcataccgacaacctacttcgaattatccgcaacctgaagagaaaagatattctcgttttcaaatgattgcacattttttgattgattatattccgcaaaataatcaatacatttcaacgcgcgaacaagtagaattgttcaaagatgaaacaaagcaaagggaagcaattgaagaatttcataaacagttaacacccaaaaccgaagctgaacaaaaagctgaaagcttgtctgcgttagctgcaaaattcaataacccaaataacaaaaaacaaaaaaataatgcatcggaaaataaacctgacgaaaaattttacgtttttggaattgacagaggccaaaatgaacttgcaacactttgcgtaattaatcaagacaaaaaaattattggtgattttgaaatttatatcagaaaatttaattcggaaaaaaagcaatgggaacatttaaaacttgaaaatcgccatattttagatttgtctaatttgagagtcgaaacgacaattgtaatagacggcaagcccgaaaagaaaagggttttggtggatttaagtgaaattaaagtcaaagacaaaaatggcgaatataaaaatccggataagatgcagacaaaaatgcggcacttggcatatatccgcaaagtacaatttcaaatacaaaataaccccgaaggagttttggattttctaaaaaaattcaaaacaaagaacgaaaccatttacaacttggttgataaggaaaatggagaaaaaggtttgatttcattttatggggccggcaacacaaatgaagatttacctaaagatgacatctggaaaatcttgcaaaaatttcaagagttaaaaaataaaacaggtgacgacaatgttaaaaaagagattaaagaattgattgaacttgagccggttgataatctaaaaaacggtgttgtagctaatatggtcggcgtgattgcttatttgttagaaaaattcgactatcaggtttatattgctctggaagatttgacaaaaccgttcaacgaagatattaaagacggcacaactggggtgaaaggcaattacaaaggcgaagggaaacgggctgatgttgaaaaatatgccgggctcggactgtataacttctttgaaatgcagctacttaaaaagttatttcgtattcaacaggaaaatgataatgttttgcatttagtacctgcgtttcgtgcggtaaaaaattatgaaaatttgatcgcaggtaaaggtaaaattaaaaaccaatttggaattgtttattttgttgatgcaaactcaacgtcaaaaacttgtcctgtctgtagttctatacctgataagaataattcgaataacaaaaatgcaaaagggaaaaaaataataaataagaaaggaaacgaaagtgttatttgggttgagcgagataaatctaatggcaacgacattatccgttgttatgcctgtggttttgatacaacaaaaaattattccgaaaatccgctaaaatacattaaaagcggtgatgacaatgctgcatttattatttcaactttaggaattaaggcgtatgaattagcaaaaactttggtggcgaataaataa

SEQ ID NO: 203 - DNA, 3831 bp, Unknown
  Metagenome-Derived Sequence
  misc_feature (1)..(3831): Unk35 Csm1 gene
atgaaaagttttgaaaacagctgtcaaataagtaagactttgcgttttggagccacattaaaagaggataaaaaaaaatgtaaatcccatgaagagcttcaagagtttgttgacatatcatataaaactatgaaaagtagcgcaacaatagctgaaagcctaaatgaaatagagttagtcaaaaaatgtgagcgatgttatagcgagattataaaatttcatgaagcttgggggcaaatctattgtcgaacagaccaaattgcagtatacaaagatttttatcgtcaactggcaagaaaagctagatttgatgtaggcgatcaaaatagtcagctgattaccctctcatcattgagcagtaagcataatgtgtatcaaggactaaaaagatcgcaacatattacaaattattggaaagataatattgctcgtcagaagagttttttaaaagattttagccaacagctccatcagtacaaaagagctcttgaaaatagcgataaagcgcatacaaaaccaaatcttatcaattttaataaaacattttcgatacttgcaaatcttgtaaatgaaatcgtgattccactgtctaatggtgcgatttcatttcctaatatcagtaaacttgaggatggagaggagagccgccatctaatagagtttgcactgaatgattacagcgatttggtcggctcgataggtgagttaaaggatgctattgctacaaatggagggtacacaccgtttgcgaaggtcacactcaaccactataccgcagagcaaaaaccgcatgttttcaaaaatgatattgatgccaaaattagagaattaaaacttatagagttggtagaaaaattaaaaaataaaacttctaaacaaattgaggagtatttttctaagtttgacaagttcaagatctatgatgatagaaaccaatcagtcataattagaacgcaatgttttaaatacaaaccgataccttttttggtcaaacacgaattagcaaagtatattgcggaggatgaagacgctgtattaaaggtgttggatgccattggtgcgacaagaagtcctgcgcatgattatgcacacaatgaagatgtatttgatttaaaacattacccaataaaagtcgcttttgattatgcttgggaacagttggcaaacggtgtttatactacggtctcttttccagaagagaagtgtagagagtatcttaacgctatctacgggtgtgaagtcactaaagaacctgtttttaaattttatgcggatttgctttatattagaaaaaatttagccgtccttgaacataaaaacaatttgccgagtaatccagaagagtttatttgcaagattgaaaatacatttgaaaagatagtattgccatataagattaaggaatttgagacatataaaaaggctattttaacatggattaatgacggtcgtggtcatgaaaaatatactgattccaaaagagagcttggtctaatacggggtggattgaaaggtcgaattggggctcaaaaaatgtttcgtaaaaacaaaaagggagaattaataccttactacgaaaatccatatacaaaattaaccaatgaatttaaaaatatatcttcaagttatggcaagacgtttgcagagttgcgagataagtttaaagaaaaaagtgagataacaaaaattacccattttgggattatcatagaggataacaataaagataggtatcttctagccaatggattgcaacacgataatactgatcaaagcaacactcaagtagaagcgatactgggcaaactcaatacctctttagaatttaccacctatcaagtgaaatctttaacctccaaaatattgattaaacttatcaaaaatcataccacttcacctaatgccaaatccccgtatgcagattttcatacttcaaagatacatgttgactggactaagattaaaaaagagtgggatacttataagagcaatcattcattattgcaatatgttaaagattgtcttaccaactccacaatggcaaaaaaccaaaactgggcagagtttggatgggatttagagagctgcaacagttatgaagcaattgaacatgagattgatcaaaaatcatacatattgcaaaaacacacaatatcaaaggcatcaataaagtctcttgtggagaatgggtgtttattgttgcctattgtcaatcaagatattacctcgcaagggcgaaaagataaaaaccagtttagtaaagattggaaacaaatttttgaagactcaaaagagtacaggcttcatccggagtttgcggtctcttataggacacctataaaggattatccaaaagataaacgatacggcagattacagtttatctgtgcctttaactgcgagattatccctcaaaatggggaatttatcaatctcaaaaaacagatagagaattttaatgatgaagatattcaaaagaacaatgttgctgagtttaacaataaagtaaacgaagctttattgggcaaagagtatgtagttatagggatagataggggcttaaagcagcttgccacactgtgcgtccttaataaaagagggaaaattttaggcgactttgagatttacaaaaaagagtttgtccgtacagaaaacagaagtaagaattattggaagcataccctagcggagacaaggcatatccttgatctatctaacttgcgtgttgaaactacagttgaggacaataaggtactggtcgatcaaagccttacgcttgtgaaaaaaaatagagatacccctgatgaaaaagcgacagaagagaacagacaaaaaatcaaactcaaacagttgtcatatataagaaagctccaatatgcgatgcaaactaacgagcaagctgttttggatttactaaaagataactccgatgatgaagagttcaaaaagagagttgagggtgttatctctccttttggagaggggcaagagtatgcggatttgccgattgataccatgagagcgatgatacaagatttacaaggtgttatagcaaaaggcaataaacaaacagaaaaaaacaaaatcatcgagcttgacgctgccgatagtctaaaacagggcgttgtagccaatatgattggcgtagtgaattttattttagcaaaattcaattatgaagcctatgtgtcgttagaagatttaagcagggcatataacgtggcaaaaagtgggtatgatggacggtatctgccatcgactagccaagatcctgatatggactttaaagagcaacaaaaccagatgttagcagggttgggaacctatcagttttttgagatacaactgctaaaaaaattacagaaaatacagagtaataatactgttttgcgttttgttcctgcctttagaagtgccgacaattatagaaatattattaaattaaatccaaaatatgataacacagaatatgtgcataaaccgtttggtattgttcattttattgatccaaaagatacttcaagcaaatgccccgtatgtggcaaaacaggtaaaaaaaatgtagatcgaaatgaaaaaaagaataatatcttgctatgtaaagcgtgtggatttagaacagtttgggagcttaaacagccagaaaatatcaagagtgagggatattgttttagcgaagatgagattcaaaagacgataaaaaacaatcaaaagcaaatggagataaaaaagctttcagataaaaatattcactatatccacaatggagatgacaacggagcatatcatatcgctttaaagagtgtagaaaacttaaagcataaggaataa

SEQ ID NO: 204 - DNA, 3894 bp, Unknown
  Metagenome-Derived Sequence
  misc_feature (1)..(3894): Unk36 Csm1 gene
atgaaaagcattgtaaataactatcagatttcaaaaactttgcgttttggattaacgcaaaaaacgaaaattcagaaggaagggtataatggagagatatatgtaagtcacagagagctctgtgatttggttaaaatttcagaagaaagaattaaaaaaagtgtttcagctagtgataagtcaaatcttgagttatcaatagatataattgatacatgtcttaaacaaattggagttttcctatcggattggcagcaagtatattatagaaaagatcaagttgcattggacaaggattattataaaattctttgtaaaaagatagagtttgatggtttttggaaagatgacagaggtcaaagaatgcctaattcaaggataataaatatatctgaattagataaaagggatagcttgggtgttgagaggttgcattatatattgaattattggaaagacaatttggtcagcgcatctcaaaaatattcggcagtagaggagaaaataaaacgatttaagtcggctataaaaataaataggacagataacaaaccagacgaagttgaacttagaaaaatgtttttatctctggcaaatattgtttgtgatacgcttcaacccttgtgttatggccaaattagtttcccaaaaataaataagttggacgattctagaactgataacaaaaagctaataaaatttgcaacggaatataagtctaaaaatgacttgctcactagcattgcagagcaaaagaaatattttgaggaaaatggcggcaatgtcccattttgccgagccaccctaaatcctaagacagccataaaagaccctaattcaacagataacagcattaaaggtgaaatagctcagttaggcctagattctatattgaagagttttaaatcttatttattctttgaaaacagtttggagaatatgtcagcaaaagaaaaaattgatttaatgaagagcgatggagctagtatcattaaaaaagggcttatgtttaagtacaaaccaattcctgtcatagtacacagagaagttgctcaggaattaagtgaagatttaaataaaactgaggaatcattaagtgattttttgcgaggtattggacaagctaaaagtcctgcaaaggattatgaagagttgactgataaaaatgaatttaatatagaggcatacccaataaaggttgcatttgattttgcttgggaaagtttagcaaaggctaaatatcacagtgaaatagatttgcctgtagattcttgtaagaagttcctgaagacttttgatgtgacaccggatgacgctaattttctattatatgctcaacttcaagaactcaatgctcttatatctacgttagagtatggatatccttctgatgaacaatccattgtaaaaaaaatcaaggctctgtctaatgaaatacaatgggagaaagtttctgacaggaacgggcaagaatacaaaagatcaatctctgattgggctgatggcaaaagagattctgacggttttaaaattgcaaaacaaaacataggtctttttagagggggattaaggaataaaatagataagtattacagtttaacgcaaatatataaaaagactgtgatggatgagggaaagatatttgctatcatgcgagataagataataggtgcagccgaacagaataaagttacttattatgcggcgattatagaggataacacaggagataaatatgtgttattacaggagttgccattgaacggacaagacagaatttatgacaaaatgacccgagacggagatggatacgtttgctgttttgtcaattccattacatcacgcactattgctaaacaattaaggaagaagagaatggcggagctaaagaagaataaagcgtggggggcatataatgataatgttagtaatactcaacagccggtactttctgatgaagaaaaagaagaaagaaatataagggaatggaaaagttttataagtgagaagagatgggattgtgagtttaatttgaactttaaaggaaaaaactttgaggaaatcaagaaagaaatagatgcaaaaggatatgaattagaaaacaggcgcttgagcagagaagcgcttgatgagttagtaaaaaacaataaatgcttattgttgccaatcgttaatcaggatattataaaagagaacaaaacggagagtaatcaatttaccaaagattggaattctatttttgacgataattctccgtggcgtctaacccctgaatttagagtatcttaccgcaaacctactcccgattatcctgtatctagtaagggagacaagcgttactcgcgtttccaaatgattgcccattttttatgcgattacattcctaatagtgatagttatgtatcagttagggaacaaattgagaattataaagatgataaaaagcaagagactgctgttaaggatttccataataggttattgggaaaaactgaggagcaaaaaataatagatagattgggtgcatttcagggttggggtaatgttatcataaaaaagactaaaccagaaaagcaagaaggttctaaagaaaaattttttgtttttggaattgacagggggcaaaatgaacttgctaccctttgtgttatagaccaagataaaaaaattcaaggaggctttaaaatatatactcgttcattcaatagcgagaaaaaacaatgggaacataaattcctggaagagcgcaatatcttggatttgtcaaatttacgtgtagaaactactattgttattgatgggcaggaaaaaaaggagaaagtgttagtggatttaagtgaggtaaaagtaaaagaccattttggaaattatgtaaaacctaataagatgcaagttaaacttcaacggttggcatatatccgcaaacttcaattccaaatgcagacgaatcctgaaagagttctagaatggtattctcataatcagactaatgatttgattattaacaattttgtagataagcaaaacggggagaaaggacttgttccattttttggagctgctgttgcagaattaaaagacacattacctatcgataggatttccgagatgttaaaacagtttgtggaactaaagaatttggagaagcaaggggaggaggtgaagtcaaaaattgaccaacttattgaacttgaaccggctgataatctaaagtctggtgtggttgcaaatatggttggtgtaattgcatttcttcttgaaaagtacagctatcaggtctatatttcattagaagatttgtcaaagccatttgaaaaccaaattgttttgggaatcagtggggtaccaattggtattaacaaaggcatggctggtagaagtgttaatgtcgaaaaatttgcaggtcttgggctttataatttttttgaaatacaattgttaaagaaattattccggatacagcgggatagttgtcatatcttgcaccttgtacctgcttttagggccatgaaaaattatgataatgtggcagtaggaaaagggaaaattaagaatcaatttggaattgtattctttgtggacgctgctgcaacatcaaagacatgtccttgttgtggcgctaacaatagtaaaaagtttgaacctgattttagaaaattccctaatgctaaaaaatttgagactccagataaaaagtctgtttggttggaaagagataaatctgatggtaaggatattataaggtgccatgtatgtggatttgatacttcaaaagagtacgatgataatccacgtaaatacataaaaagtggggatgataatgcagcttatttgatctctgctgagggtgttaaggcatatgaactagctacaacgttagttgataataaataa

SEQ ID NO: 205 - DNA, 3948 bp, Unknown
  Metagenome-Derived Sequence
  misc_feature (1)..(3948): Unk37 Csm1 gene; TGA encodes Gly
atgattaatttagaaaattttaaaaatttgtatgaagtgaggaagacagtgaggttctgattaaatcagcctaacaaaaaatgagattttaaaactcatttagaatttaaagattttactgaaaagtcttttcagaatgtcgaaaatgagctagcatcaaatggtaagtataatatcggtgatgaagaacagcttattaaaaaaatatctgcttttgttgaacaactaaaaattcaactatgatactggaaagttttttatcaaagatatgatttaatagctataaataaagactactataaaatattggcaagaaaggcaaaatttgatgctatctgggagattagtaaatcaaataaatatataaaagttaaacaacctcaagcaagtcaaatttctttatcatcattaaagatttgaaataggagtgatagtattattcaatattggtgagagataattgagaaaacagattatttactcaatatttttaaacctaaattagaacaatacgagagggctattaaagatgctaataatgctcatattaaacctgatagtattaactttagaaaaacctttttacaacttttgaaactaactaaggaatttttacaacctttatctgacagatcaattatttttgagttttcaaagaagaaagtttctaaagaaattgaaaagatttctgagtttgcttgagaaaaaaataatacaaaaatttataatgtattgaaaaattgagaagaacttagacaatattttgaagcgaattgatcccaagtttcatattgaagagtaagtctaaactattatacggcggtacaaaaaccaaataattttgatcaagaaattaaaaaatctatagacgatttatgaataataaattttttgaagaaaagtgatagtcaaattatcgattatcttcatcaaggatcaaaacagaaaataaaattgttacttacttcaaaacatccttatcctattgagttattacagttatttaaagtaaagcctattcctttttcagtaaaatataatttggcaaaatttgtagagaaaaattataaaagtgaaaccaatttatcttatgaagacattctaaataaatttaatttattatgaagagctattgatatcgcgaatgattttaaaaattctaatcataaaggcaatttttcccttgatgaatatcctgtaaagttagcctttgattatgcttgggaaaatacagcaagaagtttaaaaagggatatttctttcccaaagaaagtgtgtgagagatttttaaaagataattttgatattgatgttgataatgcagattttaaattatacgccaatcttttattcatagcggataatctagcaactattgaatataataatccaaataatgaagcagaacttataaatgaaataaaacaggcatttgaatgcatgagcttttcttttgaaaaaaaagtatatgaatgacataaaaaagctatcttggaattattagataaggaaaaatcccaaagagactattctactatatcaaaagcaaaacaagaattgtgattattaagatgatgactgaaaaataagattaaaaaatacagagatttaacacagagattaatagacaaaaagaattcacatttttgaattgctagttttataggaaaaacacttgctacaataagagatggactgaaagaagaaaatgaattaaataaaattagtcattatggagtgattattgaagataataatcaagataaatatattcttatatcaaaacttgaaggaaaagacagaagagataagattgttcaaaagctttgaaagtgagacataaaggtgtatcaagtaaattcttttacttcaaaagcattaaataaatttatcaaaaatcctttgtcagaagacgcaaaaaaatttcatgggaaatataaagatgaatatggtttttgatatgaaaataaaaattgagatttcacttataaagtaaaaaacgtttcagaatatgacgaacaaggaaaatggatatgatatcaggaagaatttttaaatcatataaaaaagtgtttaattgattctgagatctcaagagagcaaaattggacggcctttggttggagttttgatggttgtaataattatgaagagatagaaaaagaaattgattctaaatgatatcagttgaccgaaaattctatttcaaaggggaatttagaaagcctcgtgaaagatgaagattgttcgttgttccctatcattaatcaagatatttcaagtcaaaaacaagaaaataaaaatatttttactttagattttgaaaaagtatttgagagaaaagaatgtaggattcatccagaattttctatcttttatagaaagccaatagaagaacacaagaaggagaataaatcatgaatcataaatcgttttggaaggttacaattattagcaaatcttggtatagaatttgttccaagaaatctttcttttaaaacaaagaaggaacaaaatagaattgcgattgatcaaaagaaacagaatcagttagtgcaagagtttaatcaagaaaaagtaaatacgtatttcgaaggattagataattattatatttttggaatagatagatgaataaaacaattagcaactctatgtgttactgataaaggttgagttattcaggattttaccatctttacaaagcattttaaccaagcctctaaaatatgggaatatagagaaaatagaaaggaatgaattcttgatttgacaaatcttaaaattgaatctgataaaaattgaaatacttatatagttgatatttcattatttgatgcaaaggatgataattgaagatctacaggaacaaataaacaaaatattcaattaaaacaacttgcatatattagaaaattacaatatcaaatgtctgcaaatgaaaaatgagttttggatttcatagcaaaatatataagtaaggatgaaagagaacaaaatataaaagaactcattactccatataaagaatgaaaaaaatttgcagatttgccaatggatatttttcaagaaatgtttgaaaattattatagattaaaaactgatcaaaatttgtctgaatttgagaagaaaaatctcatgaagatcactacagaacttgatgcgagtgaaaacttgaaaaaatgagtagttgcaaatatgatcggagtgatttattatttgatgaaatattatgattataaggtaaaaattacccttgaaaatttaaatcaatctttttgatgacaggttgattgaataaataatcattatgtagatataaagaataatttcatgtaccaagaaaatcaagctttggcttgagtctgaacatatcatttctttgaaatgcaattattaaaaaaaatatttaaaatttctactgaagaatgaattttacatttggttccaagttttggaagtgtgaaaaattactttaaagatattgaaaaatactcattgattgtcaatatttgaagaaatgaaaaatataaccaattttgagttgttcactttgtaaaacctgataatacaagtaaaaaatgtcctgtttgtttaaatacgcaaacgacttgaaaaaaagaatgaatgccgatcataaatagaaattacaaaaaatctaatatattttattgtgaaagatgctgattccaatcaatacacagtcattgtcaagaagaaaatattaaagatagtaatgattttcattattctgtagaagaagtagaaagaatagagatgaaaaataaagaagcaatagaaaaatataaaaaacaatgaaaaaatcttcattttataaaaaatggagatgataatgctgcatataatatttgagagaaaataagagaacttccaaaaaaatcagatgtaaagaatacctcgatttcatgaaatatttctttttcatag

SEQ ID NO: 206 - DNA, 3831 bp, Unknown
  Metagenome-Derived Sequence
  misc_feature (1)..(3831): Unk38 Csm1 gene
atgaaaagttttgaaaacagctgtcaaataagtaagactttgcgttttggagccacattaaaagaggataaaaaaaaatgtaaatcccatgaagagcttcaagagtttgttgacatatcatataaaactatgaaaagtagcgcaacaatagctgaaagcctaaatgaaatagagttagtcaaaaaatgtgagcgatgttatagcgagattataaaatttcatgaagcttgggggcaaatctattgtcgaacagaccaaattgcagtatacaaagatttttatcgtcaactggcaagaaaagctagatttgatgtaggcgatcaaaatagtcagctgattaccctctcatcattgagcagtaagcataatgtgtatcaaggactaaaaagatcgcaacatattacaaattattggaaagataatattgctcgtcagaagagttttttaaaagattttagccaacagctccatcagtacaaaagagctcttgaaaatagcgataaagcgcatacaaaaccaaatcttatcaattttaataaaacattttcgatacttgcaaatcttgtaaatgaaatcgtgattccactgtctaatggtgcgatttcatttcctaatatcagtaaacttgaggatggagaggagagccgccatctaatagagtttgcactgaatgattacagcgatttggtcggctcgataggtgagttaaaggatgctattgctacaaatggagggtacacaccgtttgcgaaggtcacactcaaccactataccgcagagcaaaaaccgcatgttttcaaaaatgatattgatgccaaaattagagaattaaaacttatagagttggtagaaaaattaaaaaataaaacttctaaacaaattgaggagtatttttctaagtttgacaagttcaagatctatgatgatagaaaccaatcagtcataattagaacgcaatgttttaaatacaaaccgataccttttttggtcaaacacgaattagcaaagtatattgcggaggatgaagacgctgtattaaaggtgttggatgccattggtgcgacaagaagtcctgcgcatgattatgcacacaatgaagatgtatttgatttaaaacattacccaataaaagtcgcttttgattatgcttgggaacagttggcaaacggtgtttatactacggtctcttttccagaagagaagtgtagagagtatcttaacgctatctacgggtgtgaagtcactaaagaacctgtttttaaattttatgcggatttgctttatattagaaaaaatttagccgtccttgaacataaaaacaatttgccgagtaatccagaagagtttatttgcaagattgaaaatacatttgaaaagatagtattgccatataagattaaggaatttgagacatataaaaaggctattttaacatggattaatgacggtcgtggtcatgaaaaatatactgattccaaaagagagcttggtctaatacggggtggattgaaaggtcgaattggggctcaaaaaatgtttcgtaaaaacaaaaagggagaattaataccttactacgaaaatccatatacaaaattaaccaatgaatttaaaaatatatcttcaagttatggcaagacgtttgcagagttgcgagataagtttaaagaaaaaagtgagataacaaaaattacccattttgggattatcatagaggataacaataaagataggtatcttctagccaatggattgcaacacgataatactgatcaaagcaacactcaagtagaagcgatactgggcaaactcaatacctctttagaatttaccacctatcaagtgaaatctttaacctccaaaatattgattaaacttatcaaaaatcataccacttcacctaatgccaaatccccgtatgcagattttcatacttcaaagatacatgttgactggactaagattaaaaaagagtgggatacttataagagcaatcattcattattgcaatatgttaaagattgtcttaccaactccacaatggcaaaaaaccaaaactgggcagagtttggatgggatttagagagctgcaacagttatgaagcaattgaacatgagattgatcaaaaatcatacatattgcaaaaacacacaatatcaaaggcatcaataaagtctcttgtggagaatgggtgtttattgttgcctattgtcaatcaagatattacctcgcaagggcgaaaagataaaaaccagtttagtaaagattggaaacaaatttttgaagactcaaaagagtacaggcttcatccggagtttgcggtctcttataggacacctataaaggattatccaaaagataaacgatacggcagattacagtttatctgtgcctttaactgcgagattatccctcaaaatggggaatttatcaatctcaaaaaacagatagagaattttaatgatgaagatattcaaaagaacaatgttgctgagtttaacaataaagtaaacgaagctttattgggcaaagagtatgtagttatagggatagataggggcttaaagcagcttgccacactgtgcgtccttaataaaagagggaaaattttaggcgactttgagatttacaaaaaagagtttgtccgtacagaaaacagaagtaagaattattggaagcataccctagcggagacaaggcatatccttgatctatctaacttgcgtgttgaaactacagttgaggacaataaggtactggtcgatcaaagccttacgcttgtgaaaaaaaatagagatacccctgatgaaaaagcgacagaagagaacagacaaaaaatcaaactcaaacagttgtcatatataagaaagctccaatatgcgatgcaaactaacgagcaagctgttttggatttactaaaagataactccgatgatgaagagttcaaaaagagagttgagggtgttatctctccttttggagaggggcaagagtatgcggatttgccgattgataccatgagagcgatgatacaagatttacaaggtgttatagcaaaaggcaataaacaaacagaaaaaaacaaaatcatcgagcttgacgctgccgatagtctaaaacagggcgttgtagccaatatgattggcgtagtgaattttattttagcaaaattcaattatgaagcctatgtgtcgttagaagatttaagcagggcatataacgtggcaaaaagtgggtatgatggacggtatctgccatcgactagccaagatcctgatatggactttaaagagcaacaaaaccagatgttagcagggttgggaacctatcagttttttgagatacaactgctaaaaaaattacagaaaatacagagtaataatactgttttgcgttttgttcctgcctttagaagtgccgacaattatagaaatattattaaattaaatccaaaatatgataacacagaatatgtgcataaaccgtttggtattgttcattttattgatccaaaagatacttcaagcaaatgccccgtatgtggcaaaacaggtaaaaaaaatgtagatcgaaatgaaaaaaagaataatatcttgctatgtaaagcgtgtgcctttagaacagtttgggagtttaaacagccagaaaatatcaagaatgagaaacactgttttagtgaagatgggattaaaaagacggcagaagacaataacaaaaaaataaaagaaaaaaatctttcagataaaaatcttcactatatccataatggagatgacaacggagcgtatcatattgctttaaaaagtgtagaaaacttaaagcataagaaataa

SEQ ID NO: 207 - DNA, 3516 bp, Unknown
  Metagenome-Derived Sequence
  misc_feature (1)..(3516): Unk39 Csm1 gene
atgaataatataaagacaacaaaagcaataagatttaaactcgaaaactctgctagtaatagagaaatacaagaacgtatagacaatctaagttcaaataatggtttcgaccttgtatcttttgtaactgaattaaataactatattgatttattgaatggttatttgttttgttcaaggggtgataggttttacctaaacgacaagtttattctaaaaaaagaatggatgaaaaactatgctaagcaagagtttgcagagtttaaaaccaaaatcgacaatacagctaacggtgtaagagtacaatatacagttggcgattatagagtagaatcgaaaatacaagctgcattcgataatatagatgaaatatatggtgaactttgcgatgatgcttcgagggaacttaatgaaagatctaaacgcacacgaacagcgttgctattgaaacgcttgtatgcaaaaaataatttgccattgcttattgattttgtggaaaattcgacatataaaaaggaagtaggtaatgatagtttggtgttgaagtcgatgggaaaacgattgatggagcatcttgaattgggtattcaggagtatttgcccgaacaatcggccggtgtgtctattgccaaagccagctttaactactatacaataaataaaaagcctattgattatgatgccaagatagaggaaatagaaaaaaaattagttgttagtaatatcgaccgaacttggaatgatagggataataagataaaaaataatggtagattatggaatattgttaaggctgatattgcaagccgacaaaataataaaccgttgtgcatcggcgactctccttttatggatgttgatgaatatgcaagtttgcgacaaataatgaagaatatattgtcggaacaaaaggcggcttttaatgaacttatgcaacaaggtggtagttacaaagaattgcaaaatactgatttgtatttgtttaaggatattacaaaggatgagtttgataagtatagcgaacttacagaagatatagaagaattagcaacaaagcggaatcaaactaagaacgagcaaaagaagaaagaactgaagtcgcagattgaaagattgtcgaaacaacgtggaagttttataagcgaagcagataaaactacagaaaagatgtttaaaacttataaggctttttcggtattatacaaaaaaatagctcaaaagcatggtaaagaattggctaaactgaaaggtatagagaaagagaaagcagaatcgcaaacattgcaatattgggctatgattcttgaaaaagataatagacacaaactggtgttggtaccaaaagcgaaggcaaacgaatgccgaagccgattggtagaggctgataatgccaatggagtcataaaattatattggtttgaaagttttacttatcgcagtttgcaaaaactatgttttggaaatatcgaaaatggaagtaatacgttctatccgcaaataagaagggatagggagcttggtcgtaaatactctagtcttgataggaatggttatcctaaatttatatccggagaacatgagtttgcaggtgacgaacagcgtaaaatacaattttaccaagatgttttgagaacagactatgcaagaaagaatctgaatttgccatacggtaaggtggaagaaaggattataaattcaactttcgaatcgcttgatgattttaagatagcattggaaagtatttgttaccgtagagctgtatgtaccaatattcatttgatagatgctttggaaagtgagtatggtgctcagatttttgatattacgtcgttggatttgcgaagagaggataatataaaagataaagaagagaagtattcgtattcctacaaatctcacactgctgtatggaaagaattttggactgcggagaacgagaagcgtaattttgatatacgactgaaccccgaaataagcataatataccgcaaagccaaggaaagcagaatagaaaaatatggtgtcgacagcaaaaagaataatagatatttgcatgatcagttgacgttggtaactacattgtcggaacattgcaattcgcccgaaaggaatattgcttttgcaactatcgacgaggaagagagaataatagctgaattcaacagtaagttggataagggaaatattcgttttgcttttggtatagacaatggcgaagtggaactttctactttaggagtatatttgccggagtttaagcagaaaagtattgaaagttcgctcacggaggtgaataatgtagataagtatggttttgacacattgactatccgtaacttgatgcattccgaaaaagatgtgaatggtagagatagacgaattattgataatccctcttattttttgaaagaagatttgtattgtcgcactttcggaaagaatggcgaagaatacaaggctatgtttgacaaagtgtttgaacaacggcggttgttgacgttggatttgagcacagccaaagtgatatgtggtaggatagtaacaaatggcgatgtgatttcgctatacaacctatggatgcgacatgctcaacgcaatatatacgatatgaacgaacatatagaaggtggcggagcaaaagtgtatttgaaaaagagcgaggtactaaacgacaatgaaaaacgtaagtttcttgactacttgaatgatggaaatgaaagatatgaaagattatcggatgcagagaaaaaagattatataaattggatttataagatatgggatggagtggaagttgaaaatgatagatttgcagaagtaaggaggaaacaaaagagaccgggcttctactttcacaatgtgctattggcagcaagctatataggcgaagaagttcaagatgtgaaagatatagccaatatagacgatgtaagacatgtatttaaattccgcgaagatttcaaacaatttaagcaggaaaaagaaatacttgacgagattaataaatacaatatcaaggtaatttcgaacgaagaattggatttgaggctcaatcagttgaaatcgtcgttggtagccaatgtgataggtgtgatagactatctgtataagcaatataaggaacgttttggtggcgaaggtattattgccaaagaaggttttggtatagaaaaggtagaaagtgatagaatgaagttttcgggaaatatatatcgtatgcttgaacgtaaactatatcagaaattccaaaactatggaatggtgccacctatcaagaatttgacagcatttagaagtaaagataaatcatacactcaaataggatatatatgttttatcgattacgacgggacaagtcaaagatgtccaatatgcaatgccaagttggcatataaccatggcttggaatgttcggaaaaatgtggctttgatagcgaaggtataatgcattccaatgatggaatagcgggctacaatatagccaaaaaaggatttgaaagcatagttaataaataa

SEQ ID NO: 208 - DNA, 3498 bp, Unknown
  Metagenome-Derived Sequence
  misc_feature (1)..(3498): Unk40 Csm1 gene
atgaatgattggcaaaatttgtatgcggtgaggaagactattaactttgagtttaagccatcattgtatacaaaaaaaagagttttagatgcgagaataaaacgaaattctgttcttattgatgtaaaaaacaatactattgaaataattcatctttttaatactcagaatcaagaagtggcaaatttggtgcagagatatttacaaaaattgacatctgattttgatattcttgttgaaaaatttaaaaatattacagatggaatttatataaatggaagatatgagaattttaggatctatgttgaaacaagtaagttgaagttagttgggaaggattttagagattgctattttcaaatgaagaatgaaaggggaaaaagtcggaaaggctgggattattactatcaatttaatgcaaaaactaataaggcagaatttcggcatgtaaaatttggtgattttttaacagtaagtcacctatttgcatttcattatgataaaacgacaaaagacggtgaatttcaaagacttttgaaagaaaaaataaatttctttataaaaaaatataaatgtattcaaattgaacttagtgattttcttgatgataataatcgattcgaaaaatttatttcaaagcctgaaattttagatcgattaaagcgtcttgcatattgtatcggggatatcctttctttaatgaatatcttttgtgataaagggaaaaatggatctgatggttgttctgtctttattaaggatttaggggattttagaataatagctttggataatgattatgaaagcgttgtcgctgagattattaggcaggtaaattgtattaccaaccctaaagccttccattttaagtttaccttaaactttaaggcaaaaaatccgaatactcagctttctggtaatgatgttttttttaatgagaaagatttacaaaaaaaattaaaggaagaaatggataagttagagaataataagaaagaaaaatctgaatgtcagagttttctttcaaaatttgataatctagctggtaaggattgtacggatggtaggtgggcggatataaaaaataaacagggtcttcctgataattaccaagatgcaaaaaaagaatacgaaagttgtgagggtaagaaaaaggaattgagcaaggaaattgcatataatgaaaatgagaaaaataattacgctgttataaatcaacttaaagctgccattagtaatagtaaaaatacacattttggtgttgttatagaaaaagaagcaaactattatttggccttggaaaataaaatttcgaatggaaagctaaaagcagataataaatatgttcttaataatctaaaaaataaccttttttcctgtaaacttttaaaatatgaatccttgacatggaaagcggttgaaaagctttgtcttttgcccacttcgtcacttaatggtacaagcaaggatgttgttggttattggagtaagttttgtaagggtgtgataattctggagaaaaaaaatgaaaaagataaaagagacgtttttgatctgggaataataaaaaactacttggttgaaataatgtcaaaaacaaatatatcttcgggctttaataaggaagattttgataaattggtaacccttgatgggataaaagcctattttgacgattattgttttgagaatcaatggattgatgcagattgggatgaatttttaggattagatagagaaggaagtattgatttatatcagattttcaataaagattttgaacttgatgaacattttgctatttctgagaatgataaagaaagaataaaaaggattaagtttgcccaattaatattgaaagaaagattcgtagccaagcaaaaaaatagtgaaaggattagaaatctatttaccatatattggcagaattgcttcaataaatttgatactgagaaatttagagtacagcctgaagggcggatatatattcgagatatgagtcctgtaaatgatgcgaagagataccgagaagaaaaagttttgggggattttggaatactttttaatccagtggcaaaagcaatcgatcaatcgtcaaaagatgtgaaggataggattggaaattttaatgactatctaaaaaaacagcctctcaaaaatgaaatatatgttgttggtcttgatagaggtgaaaacagtcttgtgagttatacgcttgtgaagtttagaaaaaaaattgtaggcgaaaatgatattagtgttaggtttgacagcttaattggcacagaagcgtgggttttagatgaaatggtggaagtaagggatttgtcggctgtaaaaatttttaatgagaaaggaaaatggagaaaaagtgaatttgttgaacagaaagaggattattattttgtagaaaaaaatgagggaaattatgatgaagataaaaataaacaggatgcctgtaaaaaaagagatgaattaaaaaaaatgtatcctgattatggcgatggtagggaaagggttgttgtctgtccgataaggtgtaaaccacaaacgaaaaaagagaagcaacaggtcgaaatggaaaaaactggtgcatatgctgtgaaaattttgtcttgggaagatgaagatggagctgtttataattatcgagtagctcaggaaattcttaaggaggagagattgagtcaagttgaaaaaaatagagattttgaattgtttaatactgaaaaatttaaaaatggatatgtgtcagctttgattggatttattggtgaaagggtggaaacaaataatgcttatgtttctttagaaaatcttaatatgggagataaaacgggaaagggaggaaactataggaaaacatttggtgcaagtgtatatcaaatgattgagaatcgattgatgtcaaaacttggatattctgtagtgaaaggttcctcaagtgttcattcccaaaaagtcccaaaaataagaaaggttgaggagctaaaaaaagatgtactgtcgggtgagaaaaataataaagattttcaaattggtgttattcaaataactgatgagaccaatacatcacaaatttgtccaaattgtggttattctatgaataggtacggtctggcgaaaattgaaaatggggaattgaagttaacgctaaatgcggaagagcttaaagataaggattttggaattgatatttctaaggtgactatatttagggtggatgatggcgtgtttgcgtggcggtattctggtgttgctacagagaaattggataaaagtcataatgatttttgtagagttctctcaaaaactagacaaaatgaaacaaaatcaaaggattttattcggtgtgttcattgtgggtttgattcacggttcccaactaaaaatcacgaaaaactaaaaaaggtaaatggtggtgatgtgctcgctgcctacaacattgctaaacgtggtttggaattcattcagtgtaaatcagaagtaataaattaa

SEQ ID NO: 209 - DNA, 4029 bp, Unknown
  Metagenome-Derived Sequence
  misc_feature (1)..(4029): Unk41 Csm1 gene
atgttgacaaaatttgccaatctttatgagttaacaaaaacagtgcgatttggcctcacaccgaaaaatagctataaaaaggtgtcggatttttttgagttgacagaaaagtccttggaaagcgttcaagctgagatagttgaacgcgaaaaagaaaaaataaacataacaagcacagaggaatccataaaaaaaattcgagcatatgttgacgagctcaaaaaacagagtgctcaatggaagacaatttatcaaagagaagacatgattgctgttacgaaagaatattataaaaagctcgaaaaagaagcgggttttgacggtttttgggaggacagggggaaaaagcagccacaaacgagcgaaataatgctatcagcgcttagtaaagaatataataacaaaccaaggagagagtatattataacctattgggcgttgcttttgcagaagacagagcaacttaatagttattttgagccactcttggaaaaatatgaggaatctttatctcgaaaagaacaggcacatctgaagccaaatctggtggattttcgaaaacaatttttgtcattgttgaatgtgagtaacaaatggcttatgccagtcatcaatcaatctatagttttccctaaaatccataatgctagcaagggcgaacaaaatagaaaagtaaaagattttatcagtgaagaagggcgacaaaaaagaatacaattgcaatctatcgggcgaagtttgcgtgatttttttgaggcgaatggaagtcgggttcctttcggaaaagcgacattaaattatttcactgctaggcaaaaaccaaatagatttgatagcgaaatagacgctctaatgttggatttagaaatagaagaaatagtcaggaaagtaaaagatctaaatggagaagaattaaaaaactattttaaatatcagacatacgcaacaggagataaattagatgcattcttaggtcatagttatatgacgcttattgaaaaaattcaacttttcaaaccaaaaccaattccggctagcgttcgtttttccttagcggaaagactttcaaaaaaaatgaatcttccgatggaaaaagtcaccgctatttttgatgagattggaaatcctatcgatattgctagggaatatgaacaagcacttgatcagaaaaattttgatttgaataaatatcctattaatattgcctttgattatgcttgggagagttgtgcgagtttaattaaagggagaatatctgagggtgacttcccaaaagcacaatgcttggcgattttgaaaaaatttaatgcagatggcgatgattttaaattatatgctaatcttcgctatatcagagatgagttggctcctatcgaacataataacccgagtgcggatatagaaaaagaactagtctataatattcagaagacaatagggataatttactcgtccatgccatcggaatatcaaaaatatcttgatattattttgaagtgggttgaaatgccaaaaatcgaaagaaactcaagtgattctaactttatttttgccaagcaaaaaatcggattgttgcgtggtggattgaaaaataaaataaataagcacgctgaaatcacaaataagtttaagaatttatcaatggcattcggtagaagttgctctgatttgcgagacaaattacgcgaagaacatgagctttcaaaaataaaatactacagtgtcctaatagaagattcaaagaaaaacaggcatcttcttatgcttccattagaaacgggtgatcaaaaaatgtccgctgttgaaattgaaaacagattggatattttggagaataaatttgtcgaagatgctccaagtgcaaatgcatatatcgcaagtaaagtatcatcgtttacctctaaagctctggtaaaaatgttaaaaaatcctaagggaagtgaggactttcatattggtagtgaaaaatacaaactgcatgattataataacaagattaaaaaagaatggaaaatatatcaagatgattcaaaatttttgagctatgcaaaaaagtgcttatctgaatcaaaaatggccatgaatcaacattgggaaaagttcggttggaattttgaggggtgcaaaacctatgcagatttggaaaaagaagttgatataaaaggctattctttggaaaagaaatatatttcttttgagaataccgaaatgcttgtgtatgagcagggttgtcttctattccccattgtcaatcaggactatgcaagtgaggtgtgtcaaaatatttttacaggcaataagaatgcttttaccatcgagattgaaaaaggactgcaggaacaagatggctatcttattcatcctgagtttaccattttctatcaaaaaccaaccgaagattataaaaaatccaatcgatatggtcgatttcagctttctgctaattttagcctagaggtgaaaaaaataagcgataattttaaaactaaaaaagaaaagctaaaaaatatccgagataaagatagttttcaaaaagatgtgcaaatattcaacgaaagcataaatgcgcagcttagaattaatgaggatgtatacttctatggaattgatagggggataaacgagctggcgacactttgccttctgaataataaaaataaaatccaagattttattgttttcaagaaagaaaaaaagaaaagaaattctgaaaatcatctaagagaggcaggtgacttctatacgtatgttgattttgaaaaacaaaacattctagatctcacaaatattaaggttgagacttggaatatgcgagatgaaattcatcctaattcaaatttcttgaaacaggcttttaaaaaaatagaggcagatcctgaaatgaaaatgatagcgactcaattaggatatggtattaatgaaaaaaaacaatgcacaattttagtggagtacccgagcgatagaagcaacactttaaagctccgaatgaatcattttcaaagagccttgcaatttgctacttctcactcagaaaaacgagacattgttgggggaatagcagaaagaaattttgagggaacggatcttgaaaacccgagcgatgaagtgaaaaaacaaatcattcaagatctcttcgggcttgggtcagactttttaattgatgaaaagaaggcgggtgtcattaatgagctacagacaaaaaaatttagatttgaaaagatatattcccgcaatcagcagttattcttggaaatgtttgaaccattgatccagcaattgattgaatggtatcagcataaaaatgatcctgattatgagaagacaggaaaggcgaaatatgaagagatggaagatttagacactttgaagcggggtgtgacggcaaatatggtgggtgtattttcatttttgatgcaaaaatttcccggcgtgattgtgttggaaaatattgccaaagaaaaattagaaaaacctgttcaaagcaagctcgatgaacacacgcgagaagttgaaagccatcaggaagcggagcaccatcgttgggcgggggtggagctttatcgctatatggaaaaaaaattggttcaaaaattcagcaattggaggcagccaacaggagaaatttttaacttgactcctccgtttgctaatctggaatcattaaataaacaaacaatgacaataaattcagaaagaattgaaaatatgtttcagtttggaatattttgctatactcccgctgaatatacaacaaaaacttgcccgtgttgtaataaatatcatattaggaatagaaaaaaaggaaatactttcgacagtattatttgcaaaaatgaacattgcggttttgatacgcggtataatgaacctctgcacgaatcatttaatcctgcgcgtaatgtggaaatcgcattgagattaaatcctgaattcagtgaggctttaccaaagattagaagtggtgatcagagtgctgcattcaatatcgccaaaaaaggtctaattattatggaaaataaattatgttag

SEQ ID NO: 210 - DNA, 3522 bp, Unknown
  metagenome-derived sequence
  misc_feature (1)..(3522): Unk42 native DNA
atggcttcaatttgcacaagcgaaagccaagtgataaatatggaaaaatacaaaataactaaagcgattcgattcaaattagaaccaaaacagatatcggaaatcaaatctaacgtaaaagctattgaatctgaaaatgaatttaatcttgcgttattcatctcctctctcagcagctttcttagtaaattttatgagtattttttctataaaaacagaaatgacaaattgcttatcaacggtagaattgccatcaaaaatagctggctaaaacaatacgcaaaacaagagattgcaggattggagcttaaaagagggcaaaatattggtgatattggggccttatcggataaaataagaaaggcaagggatgaagtaaatgatatctatatacaactttgtgatgaaactgcagaactcaatgaaagagcaaatagagttaaaaaaggcctactgattaagagattggcagccagaaatgcgctaccgttattgatttcgctaatagaaaatagtaatgataaaaatgaaactggcaatttaagtgttgagctaaagcaattaggatcaaaattggaatctcaaccggtatctggtatcaaaatgtacctgcctacacaatcaggagggatccccattacaaaagcaagtttcaattactacactattaataaaaaacagatagattacggcaaaaagaagcaagatcaaataaatctgttgaaaattgatttaaatgattttgaagactcaaatcttaaaaaagcaagctttgtcaagaatcttaaaaagagaattgttttggatatttcaacaagaaaggaattattagaagaaaaattttcaaaatctgagagtgcttgggctgctcctttagtagagtttgattatgtttctttacggcaaatattaaagaatattaaatcataccaaataaagagattttcagagtttatgcaaagagaagattcaacatttatgaatttgaaagagaatgatgaactctatctttttaatgatattacagaagaagaatttaatgaatataaacaaaaaacaaaagatattgaaaagaaagcagaaaagaagaaccaatgcaataatgatgaactaaagaaaaaattaaacagcgagttgcaaaatcttaaaaaagaacgtggctctttaataaatgcggcagacaaaaagactaactctaaattcaaaacatacaagaaatttgtcaacatctatagaaatgtcgcacaaaaacatggcaggatattgtcaaaacttaaaggaatagaaaaagagcaagtagagtcgcaacttcttaaatattgggcggtgattttagaagaaagcggacaacataatcttgtgcttatttctaaagagaatgcaggagaattcaagaaatggctggaaaacaacaaatcaaaagaacccacgtctcctattaaaacttactggcttgagtcactgactctgagaagtttgcgaaagctatgttttggatatgtggaaaacaaaacccattcaaatacgttctatccagaaataaaaaaatctccccaattacaaaaatacaaaaattataggggtgatttcattaaaggcgagtttgatttcaagggagacgaacaaaaaacaatcaatttttacaaagatgtcttaagaacagactatgctaatggggtgttaagctttcccaaacagcaagtcaaagataaaattcttgaaaagaaattttctacattggatgaattccaaattgctcttgaaaaagtttgctatcgtcgctttgttctttgctcatctgatattaagcttaaactcatagaatacggagcagaaatttttgagattacttccctagatttaagcaacccaaataaaaaaaacattaaaaatcatacactaatctggaaaacattttggaacaccaaaaatgaaagcaaaaattttgagatccgccttaatccagaaataacaataacatatcgttcaccaaaaccaagtagagaagaaaagtatgggagaaattctacattgtatgatgaacgaaagaaaaaccgttacttgtacccccaatatacactaattactactatttctgaaaatagcaatgcccctacaaaaataatgtctttcatgatagatgatgagtttaaggcttcagttgatgcattcaacaagaaactcaaaaaagaagatgtgaaattttcattgggcatagataatggcgaggcagaactttctacgcttggagtgtatttacctgcatttaaagataaaaatgaattcaaaaacataaataagcatggctttaaagtcctgactatgaaggatttatcatattcagaaattgatacaaacgaaaaagagcgaaaaattatccagaatccatcctattttcttaacaaagaactgtatattagaacattcggtaaaacagagaatgattacaacaaaatgtttgaagaacaatttgaagaaaaaactctgctttccatagatttaaccactgcgaaagtaattaatgggcacattgttactaatggtgatgtgcctacattcttcaacctatggatgcggcacgcccaacgaaatgtatgggatatgaatgaccattcaaaaaataaaactgcgaagaaaataactataaagaataatgatgagctaacagaaactgagaaaacaaagtttgccgaatacatctcggatgaaaagaaatataaaaaattaaaagatgaagaaaagagcaagtatctaaaatggatttttgaagataggaagaccctaaaatttacagaagaggaaaaagataaatttgaaaaatgtaaaaagagaaaagacaactttacagaaaatattctttttgctgtttgtcagataggcaaagatattcaatcagttactgatgtttttgatgttcgacatattttcaagaaacgtgaaaactttgatgcactaaaaccagaagaagagattaagaaagaaatagaatcatacaattcctctgaaagcattcagaaaattagcaacgaagaactagatttgaaaatcaatcatttaaaacaatcagtcgttgccaatgctgttggagtaataaattttctctataattattataaagaaacaactggtggtgaagggctgatagtaaaggaagggttcgatactaaaaaggtggcagatggcttagaaaaattcagtggaaatatttataggattttagaaagaaagctttaccagaaatttcaaaattatggtttagttccgccaatcaagagtttgatggctgtaagagaagaagggataaaggataatgatatagacaagactatcagacttggcaatgtttgttttgtgagccaatcgaaaacaagcaacatctgcccaaaatgtaattcaaataaattaaaacacggtgatatttgttcaaattgttcttttaatttaattaagatttttcactccaacgatggcgttgcagggtataatattgcaaagagggggtttgaaaattttaataattaa

SEQ ID NO: 211 - DNA, 3654 bp, Unknown
  metagenome-derived sequence
  misc_feature (1)..(3654): Unk43 native DNA; opal coding usage (TGA > Gly)
atgtcccgcttgcggtttccacagcaatcaatgattccaatgacatcaatacaatggcgatgcaaatggtgcatacaatatagcccgcaaaggagccattatcctcaaaaaaatctccgatgaagagaaatcaaccatagtcagacaattcgagtgtgacaacgaacgaagcaaataaagctacttttatcttttctcaatcaatccatcatgtctaccatcttctcagatttccagaacctctatgaagtaagaaaaacggtgaggtttgagttgaaaccaacgatcattaagagggtatttcataaatcaaatgatgtaaatctagaaattattttgaaagatatcatagaaaaacataaaaactttattgatatgttgtgaaccacattcttttttgaggaggaagttagaataaatagtaaaggcgaagaagataagcaaccgggcctctccaacaaaccatttttgaacataatggaagaagataaggaagaggataaagcactctctcacgagagcgaagatataaagtcgcctctatcacagacaagatgaaaatgaataagagatttttctggctatagcccacaaaacattattcgtttcaagtatcagtgaatagaaaaggcatttagaaatgagtggataaaatatagggaagatatagtaaagtatagaacgaatcaacaacgacaaaagataaaaattaagaactacataaccttttcagatttatgagatgatggttttttgaagcccttttttgaagaattattacaatcacacagagaactatacgatgaaatgagtgctttgatatgtacttacgaaaataatcattcaagattatcggatgtgtgcttcgcattatgacagctcaattctagaaagtatcttggagcattatacatgctctttgaatgagggtatgtggttcacaaaaacgatacagaaattatttgaaaactcactgaacaattaaagacactaaaattaatcataaaggatgcgattagtttacttaggccacttcaatcttttggtctgcctatagaacatgttagcctcaattattatacaagaaacaaaacaccaaaagaatatgatgacgagattaaaatcaaagaaagagacttacaattatcctatagaggtgtattgtgagcattgtattgaatagacagtaatcagtctattgagaatttgtataaagaaatgaaaaacttcaaggcacaacaaaaaatggcttttatgcaacaattgcaaagtcaggttagtctcgggaatttcagaaaaccattcacatttatagatcacgaaaaagagagtcatgaaaaatttgagcttcatctcttcagtaacttgtcagaagatatatataataagatgaagggattaacaaaagatattgaatgaatatcagacaaggagaaaaggaaagagttgaagcaaaaaagaggaaaattattaaaaaatcaattgggatgtaaacaatatgtcgatttttgcaataactacaaaaaagtagcaatggaatatggcaaaaaaaaagctgaagtgctcagtttgctaagagaaaaaatagaagctgagaaggagagatgacgatgatgtttatctaaaaacaatgaggaaagtttttttatcaatacatttgaacctaaattagccaaagatatgtacaatgatatatcaacaatgccacatcaaactgattgagaaattacaatatatctattgagttctatcactttgagagcattcaataaactctgtttcaaaaaatgatcaaaatttgtgaaatgactactatgaaaactcgatgttaaatatacaaagcaagctccatacaaagagaataacacattccccatcactctaaaagggaagaaagaaatggaagaagagggaatattaatacatttttacaatgaagtattgagaaaacaagatagtttatcaataaagtatagaagtgatgattcaaaagatcttttgaaaaactgcaaggatagtaatgagtttgaaatagtgctgaaacaagaaacatatatgctagaagagaaaaaaatatcaaatgatagatttcatgaactgatagaaaaatatcaatgaaactcatatcaaattacttcatgggatctgagaaaggagagggaaaatccagaagaacagactttgtggtggcggcagttttggagtcaaaagaacattgacaacaaatataatctcagaataaatcctgaaataactatttcgtttgtaggtaaagatgaagaatttgccaaaacacaccccaatcaaagcaacaatagaaaatcaaaggagaggtatttacttactacttccatgacccacaaatcagacaaggcatatattgatagttgatttatcgaagatacagcaagaaaagaaaatattatcaacttcaacacagtctacaatcaggataagcaatttgattatctctatggacttgataagtgaacaaaagaactcgtaactttgtgagttttcaaaaaatgaaatggaaatatagagacagtaaatctatgagaggaggtaagtatttataaaattacagaaaaaggatttcaaaaaaacaaaacagtaacaaacaaaaacggagaaacaaagattcgttacttaagggacaacccttccttgttcatggaatatatagatgataatcttatatttgaaaaacaaaacatcatttcatgtctatgagattttagttctgcgaaagtaatcaaatgacatattatcctcaacggagatcaagcgacactaaaaaatctctatctcactgatgtgaaaaggaaactatatgaaaaaaagagcacaggagaaatgacaagcgaaactatttgatatgatcaaatagaaaatgttttctactatgaatatatcaatagagaaaatgttgagagatttccttttgaatcactcaaaacaatagattatctcatcacaaaagaagaaatagagaaagagttaaaagacttcttagaagatgtagcaaaagacaacatttcaatccagagaataaacaatctcagaaacgcaatctgtgcaaatattgtatgagtcattatgaaaatacaggagtcttaccctggctatattgtgcgagaatgattgggagacgatacgcaacataaacaaaagaaaacaaacacttatttatgaaatctcataaatgagaagatttacaataagttatttcttagtattgacgtccctccaatcttaaaaaaatttagatcagagacaaatattactacattagagcaagtgatacagcatgggaaggttatgtatgtcaataaagacaacacctcttcaaaatgtcctttgtgtaataaaaagctgtttggtcacatgacagattatgagtatgagatgcatcattatcaagaatgaaacgatgtagactacacacaatgaaatgacaataaatgaaagaatggaaaagaaagaatggataataacttgaagcagagcaaaaaaacagaaaataataattgtaactatcacatgaaaaataatccgtgctgattcgatttcatcaaatcatgagatgatcttgctgcctacaacatagccaaaaaatgactcgaatatctcaaatcaagagaaatatcataa

SEQ ID NO: 212 - DNA, 4014 bp, Unknown
  metagenome-derived sequence
  misc_feature (1)..(4014): Unk44 native DNA
atgagcgacacaaaatatcagataaccaagacggtaaggtttaagctggagccttatgtcgtaacagatgagtctcagactgaagaggaaaaagaacttgttctgcaaaaagaaaccgcaagaattaaggaagaaatgttgcagattcggacaaattcttccaataagaatgtatcgttagaagatgttctcaatagtaaaaacgatattgattataacgaattaaatactttacgaaccgatttaataaacattattagtcaagtaaagtatcttatttataaaacagataccaatggcaatattatttacacagacaagggccctttatggtcagatttggaaataaaattctcgtttttaagggattacattaagagcgagttttataattttaaaaacaataaatatcccgatactataaaagataagccaccaaagaaatataaattgtattgtgttgatattcaattttttagagatgcaatttcaggagaacaaggtttgtttgaacgcctaaatgaaatcgaaaagaaaattgaggattttactgaacgagaactccataacaaatctcgattcgctgatattgctttggtattaggtgatttaaccaaacgcaccaatttggagtttctgaaagctatggttaatgccttagttgtgccaaataatgacgaaaaggagcgagatttgcaaaagaacaaacttttttatgcaattcaagatttggaaagtcttgtaaataggcaacttgcctattacactccatttaagtcttctatgggattgcaaactcatggcggttcattcaattactatacaataaataaagatgaaaaagaacttcaagaagaagaaaagaatttgaccaatcaatttaaccgaattattggcagtgcacaagaaatcgcaaatacaaaagaagttgaaaagaagttgaatatagaattaaaagaggttcaagccagactaaaagaatgtggtgttgatgccaaagaagaaaagtgtcaattaaaggatagggagatacaaattaaaaacgagctatccgataaaaaaaatgaaaaaatactgattagtcaaataagaaaattcaacttaacttttgatgtattagtgtctctgtatgtcgaaaaaagaaggaaaaaaaatgatgatgatgctcgaatcaaaattatcagagagcaggttatgtctgagtttcacctgactaataaagaccttgagaaaacggtcgaacttaacattgaagaaatgtataagtttataaaattgtggaaaggaaatgaaaaaactaaatatacaacaaatttaaaaatctatgacgataatcaaagtgcacaagattttgtgaacaattgtaaattattttcgttcaacgacgattatgataagggtggtaatttatgtaaaactgatgatttgtttaattcattaaaggcacttgaatgtgaattgaaaacttattctgatgaattaggtgaaaaatataatttgaaggcaaagattgaagaatcaaaagaatcatcattcgacaatgaagaacagcaattgtgtgacgcaataaaaatattaaaagaaaaaattaaaaaactaaaaaaagaaataggggatatctttttctataagattggcttacagaattatactgatttttgcaattcttttaaatatttggctgtaaaatttggtcaaatgaaagcacgtcgcgccggaatcgaaaaagataaagttgaggcaaaattattgcactattggtgtgtaattatggagcacgacgataaaaatagcaagggcgaaacgataacgaataaatatctttatcttattcctaaggataatgttaagaatgcgtataatgacgtaaagagtaaggcaaactcaggtaatcaaacaggtaattgcaatttgtattattttgaatctttgacactcagagcattacggaaattatgctttaaagagaaaaataatacattcagaaaggaattacctaattggtttcctaaatgtgagcaaagagcaagaaaaaaaggagaaacaaaagagactcctactagcgagaaagatagaattttctattttaaaaccgcgttaacatccttgaacaatagtggcgttttagacattgataacaactctaatattctaacgatgccctttttcaagttcaagacattagataattttgaaacagaactcaatagatgttgttataaaaggattgcgtatgtaaatgacaattacggtgatgagcttatgtctaaatttaatgctatccgttttaaaataacgtcttgcgacatcgataatagtaaagaacgttgttttacaactgaaatatggaatcagttttggaatgatacgctcaacaaggataaacaataccccatccggttgaatcccgaagtaaaaatcttttggcgtactgcgaaaccgtcaagaattgagaaatatactaataatttaaatagaaatcaaaatttcaaaaaccgttataagaaagaccaatttactgttgcatttacggttactgaaaatgctttaacacccaaaccagactacggatttattgttgatgaaaaaaagcctatattaagaggctttaacaaacaatgtgatttgcagactaatattgacaatttcaatgtgcaattgaataagaatcatagtgttcatttttcaattggcattgatactggaacaaatggtttagcatacgctactgtgattaatgttaataatcaacctgagttgtttaaagtattaagaatcaaaaacaataagggtgtagagtcaaaagatgatcaacataacgtaagaacaaaacaatatttctacgttgatgaactcaatttgaagtactttaccaatgaagaaatgtacaacagagtatttgacgatggaaaattttatgaaaccttgcaaaagtttgacaatgggaaagttaaaactgaatttgaaaaagattttcaaattggcaaacaaatacggtgggtttctgagaatccgtcatatttcttgaatgagagtttatacaatatgagtttcaacgatggtagatttattgaaacaaaagtagaggtattcgaagagcttgaagttgcttcccttgatttaacaacggcaaaagtcatcaacggtgatattttgcttgatgctgattttaatacctaccaaaaactcaaaatcttgaatgccaaacgttggataagtcgagaagcgagagtaagtacatcattgtcattggttaagagaaacaatgaaatatgtatgattactactaattatcccaataacggtaagacaatatattaccaagatgctattcatgaaagtaacgaagatttttctaacgttttcaatcaattggaaaagcacaaagttgatatgtctattgatttggtaaaaatagaagacaatatcaataattaccgaaaggcaattgttgccaatatggttggtgttttaaccgaaatatacagccggatgcaaaagaaatatggcaacagaacattaggttttattgcttttgaaggttttgacgcaaaaacaattcaatctcatttggataaattcgatggggaaattactgttcctttgcgagtggctttgatgaaaaaattacaattgaaaacaaatgaaaacaagaaaaaaaatactatttggtttgaaaatcttgttcctccgtatgcagaagtgaataaattctctgacgagatgaaatatgtcattaaagacacagaagacaaagatgacatggaaaaaggagaggtaaaacaatttggagtgataaaatttgtatcaaaagccaatacaagtgaatgttgtcctatatgtggtaagaaaagtaatactaaacatacagattattttgagtgttgtgaaattacattacgtgattgggcaagtacaccgaatatgtctgatgatgataaaaagctatttgcatcaattgattgcaatgacaaagtggcagcatacaatattgccaaacgagcaatatggtaa

SEQ ID NO: 213 - DNA, 3354 bp, Unknown
  metagenome-derived sequence
  misc_feature (1)..(3354): Unk45 native DNA
atgaaaagtatgaaaaaatatcaatatacaagaagtattggatttcaactaaaaggtgatgctgttcaacacttaaaaccgaaggttgtcaatgaagaggagtttgattttcaagagcttgtgaatcaatatgatgtcatacttgccgactttaaaagagcggtgttctttgttgatgaaaaaaataaaaagtatataaaaaagtctttagagattaaatctccatggcttaaaaaacatgcaaaggtgcaattttattataaaaagttatacgagaagaaagagaaaaaatttacaattgaaacggcaccatttttgaatgatatatttttcgattgggcagaaagaaacgagatgcttttagaagaaatgaaaaaaatcgctcaaaaaccattgtgtaagcagaaaagaaaaagtgattttgcttttttggcaaggaaaatattcggatctgactatctcttttttgtaagagatttttcagaatatgcaaaagacacgcaattaaatgaagcattacaaagattgaaaaaatctgtgaaaaagttcacggaatatttggaacattctttgtatatcttatcaccacaacaatctattggtatggaagttgctcgtggcagttttaatttttacacaatcaacaaaatttcaaaactttttggagaaaaaactgtggaagatataatcacagaaaaagaggaggagggaaatatgccatatcataaagctgtaaacagtgattttttagaaaaaatgggcctttgtgagtatctgaaaaattgggaaggagaagatggagaaaaatattctacgacagtaataaaagatctttctttttgggagctatatttagttttaaaagattttaaagcacgacagaaaaaagagtttaatgaagtaatatatcaagaaaaatggagggacgaaagtataacgcaaagcagtcaaaaaagggttactggaaaattttgttttagtaaaatcaaaggcaaaaaatttaattctctggaggacttagcacaagcgggtggtttaagtgttagcaaagagcaaaaaacaaaaattcattttgaggtccagcaaaaaaagaaattaaaagaatatattaaaaatacatttccactatttgattgtaatgaagatacattatgggaatttgtgaaattaacagaaaagataaagaaaaaagcacaagaaaagaacaataacaatgttgataaagatgtgattagtgaagatctaaaaactttaagaaataaaagaggaaaatattttcaacataaatttaaaaattacagtaaatattgtaaagatttcaagtttgttgcaatggattttgggaaattgacagcggaaattcgtagtttggagcaggaaaaaattgaagcgcgtcttttgcggtattgggcacacattatagatgacggacatcagaaatcacttctcttgattccgcgagaaaaaatatcagaagcaaaaagatttattgaaaattctggggaacaaggtaattatagattgttttcatttaactcattgactttgagggcactagataaattgattcgcaaaaattatgcaaaggaaatttcagaagaaagtggacacattccttttcaacaagatcaagaaaagatatcctgctataaacgtgccctaaaaggagagctgaaagaattacaactagactcattcggctttgaggaaagtttggaagaaattattttgcgggaatataattcccttgaagatttcagaatcgcccttgagcgtgtttcgtattgcgttcatgaaaaaaccgtttcaaaaaattttcttgaagaattacagtcaaaatatcaggcaattataacagaactttcttgttttgatttggagcgtgatatttcagggagaaaacgtgcccatacaatttgttgggaaaatttttggtatgaaagtaatatgaaaaataattttcctgtgagattaaaccctgagttacggattttttatcgtgataaaattgaacaagaagatgttaaaaaacaaaaaaatagattttcaaagcaacattttagagcacgatttactgtcacacaagatgcggcagggaaagagttgaaaacaacattctccaatgaaaaggatttatgtaaaaaaattgaaaagtttaatgctgaggtggcaagtaattttataaaatatcaagaagcagaagataatttttggtattttggcattgatcgaggaaatcaagaattggcaactttgggaattgtgaaatggacaaaagaagattataaggcaatcatggaggagggaagtatacaaaagtttagtaaaccgtattttccggaaattgaagtgctagaaatttcagatatggaagcaagtaaagaaattatcataaatcgagatggaacgaaaaaagaagtaaaaattaaagacaatccctcatattttttacaaaatgaagctgaaataaaaacctattttgatgaaaagaaagtgtcttttatagacttaacaaccgctaaacttattaaagggagaattgctttaaatggagatacaaaaacatatttgaatcttaaaagagcgaatgccaaaagacgattatttacagaatttactaagatagataaaaattctgatgtatatttttttgaggatgacagctcttttcgtataaattttaagccgggtgaacgcagagcatatcagattttgtgttattatcttccacaacaagagaaagttctctcgcgtgatgtgatgaaaaaagaattgcagggatatttagagcagttacgtcaagatccgacttttcaagaaaacacaattgaagaaattaatcatttacgcgatgctattacggcgaacatggttggtattattgcatttttgcatgagaaatatcctgctattattaacctagagaatcttcattcaaaagcaaatatacaaaggcattttaacagtaataatgaaaatattgctcgaaggttggaatgggccttgtatcgaaaatttcaaaaaaaagggcttgtgccaccaaatttgaaacagacaatttttttgagagaaagtatagcagcaaactcaaaaatacataactttggtattattcaattcgttgagacagggggaacaagtgggaactgtccgtactgtggtgtaaacgtttctggaaaacagaggaagaaggataaatttgtagagcacgcatatatttgtagaaataataaaatgtgcaaatttacaacaaaaaatccaaagtatccactagaagtaattgataattctgattcagtcgctgcatataatattgcaaaattagggtttgaaattgtatctgcaaaattatag

SEQ ID NO: 214 - DNA, 3096 bp, unknown
  metagenome-derived sequence
  misc_feature (1)..(3096): Unk46 native coding sequence; TGA encodes glycine
atgaatcatcccatacaaaaaaactttaacctttttgaggtaaaaaagaacattagatttgtattagaacctctttttgaaccatcaacatcgtttgaagaaatatcaaatntaaaaactgacataaaaagctttttacataaatatgatcttgttacaaaaattatgtactgaattcttttaaatcaaagaagaatgaaattaaatgataaattaaaaattaaattttgttttttaaaaactcacacaaaagatgcatattttaaatatggaattgaaaaattaaaaaacaagcataaaaatcaaattgaaatgagcagaagagaacttgattatttaattgaagtatttcaaaatttctttcaagataattttacctatagtgaaaatttaaaacaacttctctcacaaacatctctccaaaatcctgacataaaatattattttcataaaattgcaagaaaagcaaattttgattttttttgtgatgtttctcatagtattaacactgaaattccaagtacttatggcaaaatcactgcgattaaagaaattataaaagatttagagatgctaaaatataaaattcaaaataatttacatcaagaacaatcattatgaaaaaccatagaaatatcaaatttaaattattttttagcaaataaaaaatctaaaaattataacgaacttattctcaataaagaaaattctctataccatcatatttttgcatttccaaagtttcatgcagcaaaagaagaaaatggattaaaagatttcgaaaatacctattcactttcgtattctcattcaagacttacagaaacatatgaactactcaaagaatataaaagtagccaaaaagaatgatttttacaatttattcaacaatgacattgatttgaagatttacaaaatcatgtaagtttcacatttaaaagtgatcattttgaaccaaatgaattctctttgactctctacctttttgatgatatttcaagagaaaactttgaaatgataaaaacattatctgataaaattaattttttaatagatattaaaaataattctgaaaagttattatcttgccaacaagaatacaaagatatgtttcaggaagaatgttttatttgagaaaatccttatgaaacaagaaaagnactcacaaaaaaaatcatacaattaaaaaaagaaagaggaactttttttaataccgaaaatcaaagttntatgtttaaaaaatatgcntatttttgtgcagaatataaaaaaattactttagaaattggaaaaataaaagcacaaattaaaaatttaaaagacgaacaaactcaagttgaaagaacaaacagttgggcgcttattttagaaaaagatactcaaaaatttcttcttactattccaagagaaaaagcaaataattcttattttgaaaaagagagtaatattttacaagcaagaaattttattcaatgactttcacatcaaaacaatgattacaaattatctcattttgaatcattaagtttaaaaacattagataaactctgttttgccaaagaaagtagttattttagaaataaaattgcaaaagaattatatcaagtaaattctgattttgtagaaaaaaaagaatttatcaaatttggaaaaacagtcgaaacctataatattaaaatgaaatatgaacttccaaaaacaatttcatgagaaacatgtaaaaaaactcttttaaatttttaccaatctgtaataaaattaaatagtttaaaagaacaaattatgattgaaaatacgcaacattttgagcaatttataaataaatcttttgaaaacctcattgattttgaaaaagaattgaaacaaatatgttatataaaacaaagtatttttatatcagaagcgtctaaagaatcactcatacaaaattattatggaaatctttataaaattaccagttacgatttagaaaaatctctcaaaagaaaaaatttaaaaactcatacaaaaatttggctagaattttggagtgaaaaaaatacttgagagaaatttccaataagaataaacccagaaataaaaataaattttataaaaaaagatgattctctttgagaaaattctctcaataaaaaaacaaatagaaaattaaatgatagatatttactcactacaaatatcacacaacatgcttgtaaaaactcttgatttataaacgaaaaaacaaaaaaagaaattattcatttttatgaaaactttaatagagactttgaaagtaaaaatcctgaaaatcatcttaatcatagttattttattgatatttgggaaaataattctatcaaactttctctctatgayaataaaaataattctccratagaaataaaaattyataatctaaaagaagaatatttcctacaaacaaatgaaaaatctactcctgcatataaaaatatttcttattttcaatacgactcatttcaaaaattatacgatgtagaatctgtgcaatatgtagatctcagtaccgcaaaactagtaaatgaaaaaatatatttatgaggtgatatttctacttatttaaatttaaaaataaattgtgcaaagaaaaaaatatcacaacttgancattgaaaaatttcagtaagtgaaaccaatccaaatcacattattttaactggatgagctttaccanaaacaaccatttataattttgacgaaagatataaaacaattcaatctaaagaatcaattataaaggagcttgaagantttttagaagcaaaaaatatcgattcatactttccagaaaatatttcaatagaaaatataaataatctcaaaaatgccctttctggaaatattatttgaattatattttttctccaaagaacatatcctggaaaaataattattagaaattttattaccaaagaaagtatgtcttgtcctgatggtctggataaacaaattgaagaaaaaattctacaaaaactttcatctctcagtcttataccatcaaattataaacatattttagatctcaaaaataaaaatgtcctcaacaagctgggaatggttgaatttgtaaattaa

SEQ ID NO: 215 - DNA, 3483 bp, unknown
  metagenome-derived sequence
  misc_feature (1)..(3483): Unk47 native coding sequence
atggaaacatacaaggttactaaaacaatccgcttcaaattagaagcccaaaacgttcctgaaatccaaaaagacattgaaggactgcaatcggaatttaatctggcaaattttgtttcagatttgaaaaattatctcgatcaagttcgtaactatttgtttagtgaaggaaaagaacatgtctttgtaaacaataaaataaccatcaaacgcgaatggttgcagaatcacgcaaaacaagaatgggttgactttttggaaaaaaacaagcgaaacaactctctaaacaatcatactcgcaggatacaaatgtctattggagattttactggtctagcatcaaaaattgagggaacatttgacgaaattaacagcatctgtaaaggactcgccgatgctgctggagcccaagccaacaaaagaacaaaaagggaacgcacaggcttgttgctgaaaagattgcaggcaagaaaagccctgccatctttgttttcacttattgaaaattctgccgacaaaaatgaaactggtaatttaagcctccaactcaaaaacaaatctattcttatagaacaacaattggcagccggagttcaaacttttttgccggctcaatcaggtgggttgccggtagccaaagcaagttttaattactacaccatcaacaaaaaaccggtggattttggtaacgagaaaagcgaactggaaagtcgtttaaaaattagtatagataccattttcaagctgacgcgcgaaaatttttcaaaaaagatagaagaagcaattactgccgacattcagaaagaattaaacaacggaaaaaccttactgcttggcgatgtgcccatgctcggtattgagaactatgtcagtttgcgacaaattctgaaaaacattaaatccaaccaaaaaaaggcattttcggatttgatgcagtctgggaaaaattacaatgaattgaaggcaaccaatttatacctgcttaacactatcgagcaaaggcaatttgacaattataaagtcaagacaaacgaattggaaaaactggcagtaaaaatcaatcaggcaaccaatgataatcaaaagaaggagttgataagcaataagcaaagagttgcaaaacagcgtggaatcataatgagagataattttgcaacttggaaaagtttctcaaatttttatagaacgatttctcaagaacacggcaaaatattagcgctactcaaaggcatagaaaaagagcgaaccgaatcgcaattgctcaaatactgggcactaatacttgaaaacaacggacagcataaactcattttgattccacgggaaaaagcggccagttgtaaacaatggattgcttcgttaaatccgtcaggggacaaactgacaaagttgttttggtttgaaagtcttacatacagaagtttgcaaaaattgtgtttcggctttactgaaaacggaaacaataaatttaacaaaaacattcaaaaccttttaccaaaagataatagtagaaagatcataaacggtgaatttgcctttcagggagatgagcagaaaaaaattaaattttaccaaagtgttttggaatcgaagtatgctcaatccgtgctcaatatcccgattcaacaagttcaggcagacatcatcaatcaaagttttgcttcactggacgattttcaaatcgccctcgaaaaaatctgttatcgcctttttgccgttgtggaagcgaatatcgaagctgaactgttgaaaaatgacaaggcccagatattcaatatcacttcttcagatttaagaaaagaggctaaagataagatcaaatcacatactcaaatttggaaagccttttggactagcgaaaacaaacaaaacaattttgaaacccgcctcaatccagaaataacgatcacttaccgccagcccaagcaaagcaagatagacaaatacggcgaaagatcccaaaaaaacaaccgctatctgcacgctcagtacacattgattacaacgataagcgaacatagcaattcgcccacgaaaatattgtcgtttatgagcgatgatgagttcaaaagttcggttgataccttcaataaaaagttcaaaaaagacgagattaaatttgcttttggcatagacaacggagaagtagaactctctacgcttggcgtatattttccggcatttgacaaaacaacctacaaagaaaaggtagccgaactggaaaaagtgaatgactacggctttgaggtgttgaccattagaaacctaaactacaaagaaactgactataacggcaaagagcgcaaaatcattcaaaacccctcttatttcctgaaaaaagaaaactatttgcgaacattcaacaaatcggaaacagcataccaaaaaatgtttactgaacagtttgagaaaaaaaagttgcttacccttgatttaaccacggcaaaagtgatttgcggacatattgttacaaacggagatgtccccgccttgttcaatttatggctcaaacatgcgcagcgtaatatttttgagatgaacgaccacatccaaaaagaaacggctaaaaagattgttttgaaaaatcaattagacaccgacaatgagaagctaaaatttgcagaatatatttcaaaggaaaaggaattcggaaaactgaatgatgatgaaaaaatgaaatacacgaaatggatttttgaagacagggatcaaaataatttcacggaagtagaaaataaaaagtttaaaagatgtcagaaaatatatggaaattatagtactaaagccaaagcacctgttctttttgcctcctgctttatcgacgaagagctacaaagtgtaacggatatttttgatgttcgccacattttcaaaaaacgtgaagatttttatgccttaaaaacggaagaagaaatcaaacaactcattgacagctacaacaccaacagagccagtcacgatatttccaatgaagaattggacttgaaaatcttaaacaccaaaaaagcattagtcgcgaatgcggttggcgttattgattttctctacaaacactacgaacggcgattgggtggcgaaggattgattataaaagaaggctttggaaccggtaaagtagaggatggtattgaaaaattcagtggcaacatctatcgcatccttgaaagaaaattgtatcagaaatttcaaaattacggattggtaccacccattaaatcattaatggcggtaagagcaaatggtatagagaataataaaaatgctattttacaacttggcaatgttggttttatagatccagcaggaaccagtcaggaatgtccggtatgtatagaaggacgattggagcataccacaacttgtccaaataaatgcggttttaacagcgaacgtatcatgcattccaacgatggtattgccagcttcaatattgccaaacgaggatttaataattttgtgaaaagtaaaaccgacaagcaataa

SEQ ID NO: 216 - DNA, 3486 bp, unknown
  metagenome-derived sequence
  misc_feature (1)..(3486): Unk48 Cms1 native coding sequence
atgactcaacaaatagaagaaaaacaatcaagtcaaaattcggtttgggataattttgttaatttgtatgccgttaggaagactataaactttgaatttaaaccctcaatttctacaaaaaataggatagaaaaaataatacaagaagaatcaaaattaattaatgcggaaagaaatactattgagatacgcaatttttttaataatcaaattcaagagaatgtaaaactgacaaaaagatattttaacgaaaatctagaaaactttgatgaaattcttaataaattcaaagaaataacaggtaaaataaaaacaaaaaataattacgaaaattttagaatttatgttaatactgataaaataaaactacttgggaaagattttagggattgttatctagcaatgaagaagaaaaaaagctggaaatataaaggagtaaataatacattaaaattgattaagtttaacgattttctaacaatttgtcatttatttgattataacaaagacacaaaaactaatgaaaatgaatttgaaaaattattttctgaaaaaaccgaattactcataaaaaaatatgaatttattaaaaaacagcttaaagatttccttgatgtgaataatgatgtgaataatcaagcagagaaatttattacaaagccggagatattggacaggctcaaaagcatggctttttgtctccaagaaatgatagcagtaatgaatattttttgtgatgaaggtaaaaatgggtcagatgggttccttgcgtttgtagaagatttaaaaggttttagaaaattggttttggataaaaattgcgaagaaataattgatgagattattagacaagcaaaccatattaccaatcccaaagcgtttcattataagtttaccctcaactttaaagcaaaaaatcccaatactcagctctcggggaatgacacatttttaagtgaaaaaaaacttcaagaaaaactgaagcaagaaatggataaattagaggcaaataaaaagaaaaaatcagattgccaaagctatatttcaaagtttgacaattttggagaaaaaaaatgcacgaaagatcaatgggatttagtactaaacaagcaaggattgcctgatgattttgcagaagcgaaaaaacagtatgatgaagcaaaaaaaataaagaaaaaatccgagaaagaaatatccgacaaccaaaatgaaaaaaataattacgccgtcatcaatcagctaaaagcagctttaagaaatagccgtaatactcattttggagtgcttctgaaaaaagacggaaattattatttagctttggaaaataaaatattagacggaaaacttaaagccgataatgaatatgttttaaaaaaactggaaaacaaaaaagcctcttgccaattattgagttatgaatctttgacatggaaagcggtggaaaaactttgtttacttcccacctcttcacttaatgggaaagatgaagatatggttgaatattggggtaaattttgcaaatcggaaataattcttgaaaagaaaaatgacaacgataaaagattgcttttagataccgagaagataaaaacatatcttaaaaaaatcgtatcagacaatagtttatcaaagttttttgatgaaaaaacttttgatgaatgtaaaagtttagatgaaataaaaaagtattttaatgatgcttgttttacaaataaatgggttaatgctgattgggaagaatttttaaaattagacaatgaaggcaaagttgatttataccagattttcaacaaggactttgaactggacgaaaaatttgcaacttctgaaaatgatcagcaaataattgaaaggattaaaaaggcaaaagaaaatttggaaaagaagtttgtgccaaagcataacaatacagaaagaggcaaaagcctttttactatatattggcaaaactgtgttaatgacctcaatgttgataaatatagacttcaacctgaaggaaaaatctatatacgagacaaaagccctatccagaaatcaaaaagataccaagagaaaaaggtattgggagattttggtgtactttttaatcctataacaaaagagattgaccaatcatcaagagatggtaaaacgcggattggaaattttaataattatcttaacaaatattcccgagacgaaatatgtgttattggcttggatcgcggagaaaataatttggtaagctatggtttggtaaaatttaagaaaaaaataatggaagacagcgatataaaagtgcgcttcgataatgagattgcgaatgaatgttgggcgcttgatgaaattgtagaggtaagagatttgtcagctgtaaaagtgtttaataaaaacgggaattgggaaaagagtgagtttgtgaaacaaaaagaagatttttattttactgaaaaaaacggaacaaattatgatgaagaaaaaaataagcagtcagcggaaaataaaaaaaccgaattaaaaaatcagtatcctaactataaagatgggaaagaaagaattgttattattccgataagatacaaaccaaaaaaagacgaagaatttcaaaaaacaggcgcttatgctgtaaaaatactttcgtgggaagaacaagacggcagtgtttataattatagggttgctcaggaagtactgaaagaaaatcgattagaacaaattgaaaagaacaaagatacggaactttttgaaacggaaaaattcaaaaacggatatgtttccgctttggttggatttattgcggaaaaggtaaaaaaatataatgcctttgtttctttggaaaatcttaatataaacaaagcaaaacaggggaattatgaaaaaacctttggagcaagcgtttaccaagtaattgaaaatggattgataataaaacttggatatttgattctaaaaaataacccacaaaattacactcaattagttcccgaaatcagacgaatagaagaattaaagaaaggtaatgatgagaaagatagaaattatcaacttggatttgtacaaattaccgatgaaacaaatacttcaaaaatttgtccgaattgcggttattctaaaaatagacttgaatcagcaaatacagcaaatgggatgttaaaactatcattaaaaactatatcattaaaaaatgatgattttgggatcgatgatagtaaaaagaaaaattttctagtagataacaaaacaactgcttataaatacgcccaagacgggattatttgcgaagaaatcaaaagtggcaatagtgattttgcaaaaactttttgcgatcctcgtcaaaatatgacaaagtcaaaagattttattcgttgcgcgcattgtggttttgattctagatttccgcacaataattgtaaaaaattggaaaagataactggtggcgatactcttgctacctataacatcgctaaaagaggattggaattttcgcaagaaattaaaaaaacttga

SEQ ID NO: 217 - DNA, 3003 bp, unknown
  metagenome-derived sequences
  misc_feature (1)..(3003): Unk49 Cms1 native coding sequence
atgcacaatatgcaatacgaatacacgcgtactattaggtttaatctctctggagagaaggtgagctacatgattgatgtagatgctgcacgaagccttgaagaaacgctggcaaatttgttgatcgcatatcgcgatctgttgggtgtttttaaaaaggcaattttttatgaggataaagaaggagtgcttagagtaaaatctcgtctggaaattaagaaatcatggttgcgtcaatatgcgcgaaaggcattctattcgcttccagaagtgataaggggcagaggatcaaaatttcccgcaaaagattttgagggtaattttttagattggcttcaacgcagcagagacatatatatggatttgaccgatgtcgtgtctcggccggaaaacgataagataaaacggtctgatatatctacttatattaggctactgaaaacgtcagaatattttccgttcgtagaaaaattgctacgaccatggattgcaaatgataaagatacgaacgaatatcttgatgcgttgcgttccatagtggagagatttggacagttacttgatcaagcgttgttggttgtttcaccggatttaacgcaaggtgttgaaattggtcgcgcaagttttaactattatacggttaataagatttctaggaatttcgataaagatattgacgatataaggaataaactagaatcccctttttcggggagtttagataagcaatttttggaaaaagttggtttcaggaaagattcgagtcgcattccaatacaggaactatacgaagatttgaaaaggtttaaggcggaacagaaaaaatcatttttagaagcaacacaagcagatgttttatttgaggatctgcaagtcaagtaccctctttttaaattaaaagacgaccagacgctgcagaagtttaaagggagtaatccacaaaagagaggtgattattatagaaataattggggttttagtgactacaaaaagtattgcgacaacatatttaaaccgattgcgataaaggtcggtaaactaaaagccgaaataagatccctagaacaagagcaagtggatgcccgccttctaaaatattgggcgcatatcgtacagaaagacggtcggcatttattgttgcttattccaaaagatgcgatgcagagagctaaacaatttttagaacagttaccatcaaaacacgaaggtgaatctatgcttatcggtttcaattctttaacattgcgtgcacttaacaaacttattcgccgcaatcttgagagagaacaaacacgattgcaagatgatgctgtttctttatatcaagaagttctcaagggtcagcatcaacgtatccaactagattttaatggttttgagcaagaaataagagaagtcgcaagtggtgattatgcaaacgaggaatcatttcgaatcgcgcttgatcgcgttgcttatgtgcaatctaaggcgcatataaacgaagaacagatggcgaagctccaaaatgattttggagcgttggtgctggatatttcttcgtatgattttgaacgcactatcacaagtgataaaaaagagcattcccaattatgggaggccttttgggatttaaagaatcaaaacaatcagtttcccgtaaggctcaatccggaattgcgtattttttatcgtccccaacgagaccaggaagatatccgaaagcagaaaaatcgtttttcaaaaaatcattttggtgttgcatttaccattacgcagaacgccacgcaaaaccgcatggaaaccgcattccaagaagaaaaagcattactgaagatggtacagacgtttaatcatgaagttattggcacgtttgtagaagaaaaaggagaaaacctttactattatggaatagacaggggggatatggagctggcaacattaggagtggtacagttttctcaagagcggtacgaagccatgcttgccgaagggacggtacaaatatttgatacgccggttttcccgctcgtagaaacatatcgcattaaagaagagcatctgcacgacacaaaagaaatcgctataaacagtacgggcaagacacagacaataacattgtttaaaaatccttcgtacttcattgaagaagaggacaaatttgagaaaggcattagcccgttcatggatttgactaccgcaaaacttatcagggggaaaattatcttgaatggagacgtaatgacatacattgcgctcaaaaaagccaatgcaaaacgacagctttttgaaaagttgtctaaaatagatactaacgcgcaaattgaatttgatgaaataaagaaacaattcaagataaaatcaaaggatagcgagagagaagattgtcaatggctaccattttactctgaagagcaggaaaaagtttttcctcgtgaagcaatgagaaaggaattgcaagaatatcttgataaactgcgtgccgacattacgccggaagaaggcgttagtgtagagaaaatcaatcacctgcgcgatgctattactgccaatatgataggtattatcgcttttctgtttgaaaaatatccaggaattataaatctggaaaatctgcatagcaaagatcagattgaacggcactttagcaataataatgaaaacattgcccgacgtttagaatggagtttgtataaaaaatttcagaaatcaggacttgttccacccaaacttcggcaaacggttttccttcgcgaaaacgagacagaagagggaaagaagctcaatcaatttggcattattcattttgtcccaacaaaaaatacaagtgcgaattgtccgtattgcggggtttctgtcccaatgaaacaaagagagaaagataaatttgagcaccacgcgtatatctgtagaaataattcacaaaattgtgggtttgacactcggaatccaaaacagccgtttgagtatataaaaaactccgatgatgtggcggcatacaatatagcaaaaagtaaaatatag

SEQ ID NO: 218 - DNA, 3432 bp, unknown
  metagenome-derived sequence
  misc_feature (1)..(3432): Unk50 Cms1 native coding sequence; TGA encodes glycine
atgacactacaaaatctaacaaatttgtatgaggttataaaaaccttaaaatttgaacttaaaccaagtattaatacaaaagaaagaataaaatttgataatataaaagacttgaaattattagagaatccttcagaacttttgcaaacaacaaaagaacttgcttctctacaaagatcgatcttttgaattatttttaatttagggtctgaaaatataattatacacaaaaacttaataaaaattattgattctgatgtgttttattattttaaaaataaacaattatcatctatagtaagtttatcagaagttataaaatctataccagaattcagtaatacttttgactgatttatcaaaaatattgaagataatttatcaaaaaatatacacaaatttgaatcatatattttaaatatcgaaaaagtttataccaaaactgaaatttgatttgctatgaagcaatatagtttgcaaatacaaaagtctcatgaagtcatttctttatttgtttataaaacatgaaaaattgatggagaactaaaagaaaatctgaaaaagtacttttcttttgaagatctagaaaatacaataaaaatttgtagtcaaacaatgaaatcttacaatccaactattggatttgaaatacacaaatttggatttaatagtaaatctataaataaaaaagcagatgtggattctttacaaaagcaatgtgaaaaattagaagaagaaatggaaaaacttgaagaacataaaatacaagcaacacagatatttgatgcttatacaaaacaatttaatgattatgttattcactgaaaagaacgagatgaaaaaacttggtgaaaagtatcagaaaaacttatcccttgagatcctaagttagaagcactaaaaaacaatcagacatcttctatacaagaaataaaagaagcaaaagaatatctaaaaagtattagagattgaaattttgactatcaaaaaataaatatagcaaaaaataaatttaaaaaaagtttagtttttgttgataaaataccaaacaagaaaaaagaaaatgaatactattgtttttgagataatatatattgggatcttaaaataaagaaaactaaaaaaagtatattctattgaaagaataagtgagatcttttcgcaaaacaaacagagttatttaatcagcaaaaacttactcattatgctcgtttacttagagataaaaataacttttttgttgctatggttgatagagattgtattctagaacttgagaatataaaagaagataaagatataaaagaagattttcttaaaataatggagtattcatccctcactagcaaggcagttgaaaagcttatctttgaaagaaatgttttgaactttgattttaaagatgaacagtttataatttgtaaaaaaatacgagaaacaagaagttataaagaaaaatgatcaacagaaacacaagcacaaactctagaagaaaaacaaaagttgattcagctagtcaaatttatgaatgatgcaatatgacaaataaacgaaaaaatagaaaactctgtttttgattggaaaccttttgttattaaagatagttttgatgattttgaggaatttagaaaatatattacaaaaagttgctaccaaaccaaacgaacaaaagtttcaaaagataaaatatatgaattagacaaaaaatgaaaaataaacttatatcaaatttataataaagatttttgagtagatccatattttgcaattacagaaagagataaaaatagcaattttatagaaaaaaagcaaaaaccaaatctttttacaatttattggaaagatttatttgaacagaattgagagaatataagactaaatccagaatcaaaactttatcttcgtccttcaaaaaaaatagaagacatagactgaaataattgtgattattgagcaagtaagttaagatttaaacataataaaattattgctgattttcaattagttttttatcctaccaaaaaggaaaaactagaagaaatacagaaaaaaatatacaatgagattaaagaaaaaactttttctgtatgaattgatttgtgagaaaatagtttggctactatttgtcttatagatgacgaaaaaagagttgtgttagaccaaaattgaaatccaattatcaaagatttgactttggtaaataataagtgagggtttgtagatatagataattgttttattgaaaatgaaaattataaaagaaaggacaaactatttatagaaaatgattgatcttattttttaacagattggtatttctcaagttttctatgccaaaaaccaataaaggaactatcaaaagaagaattaaaaaatgttttgattgaattagagaaaatgtctccaaaagagttaaagataactgatacaaattgaaataaagtttttgactatagatatgcttttgtctacaagcaaacagaaaataaaattcgctaccatctacaatcaattggcttaaatgaagaagaaaaaaagtttaaagaactagagctgatggatactactagaataaaatctggttatgtaagtaaattagtttcttatataacagatttggcaaaagagtacaatgcagtaattgtttttgaaaatttagaccaaaaagcaagttatataaaatgaataactttactttcggaggaattatttgaaaatgtatcatcaaaagaaaaaagtcaacttacctgaatttcagtatatcaaaatattcaaaataaaattatcagaaaatgtaatctttttatgcaaaaaacaggtataaacacaaaattacaaattacaccaaaatttaagaacatagaagagtttaaaaactttaatatgacaaataaagataaaaatgtttgacgatgaaatgttatttttataaatgaggagaactcatcaaaagaatgtccaaattgttgatttattccagatactaatccaaaaataaaagattgcaaaatagtatataagtataattgagaagaaaaagaattgaatctagacgatgaaaaaataaaagatagaaaagaatataaaaaaatatgagatttgatgcaaacaaggattaaatatacagatttgtcaaaaagctgaaaatggtatatagattgagatcctatggtttgtgtgaattgtggttatgatacaagaaaagaagcacgagtaaaaaaacacaatctcaaatcttgtgatgaaattgcggcatatatagtggccaaaagatgattagaatttataaaatctcaaaaagtagttgagtcaatatcacaaaaacaaataaacaatgagaaaatagaaatacataaaaatcaaaaaaataacggatttatcaatgaggaatctacaatatctgggaatatagttttttcttgaaatatataa

SEQ ID NO: 219 - DNA, 2625 bp, unknown
  metagenome-derived sequence
  misc_feature (1)..(2625): Unk51 Cms1 native coding sequence
atgaaggagtgtaaatcttttctaaaagaatcatttcaggtagacacggacaagaatcctcattttaaactgtatgcccagcttatccatttaaaagaattcctctctaccttggaatctgcccggcccaaagacacacagagcattgttaaagagactcagaatttgctgagccaaatcaactgggatgctttaggaaaagacaaaaatgacaaaaggactggcaatgattacaaaatttcgatttcctcttggttggaattaaggccgaaaaacgatgaaaaattccagaaagcgaagcagcagattggcctttttcgaggtgggctgaagaataaaataaagaatttcaatgaccttactcaagcatacaaagcggttgctatgaagcttggtaaggcctttggagatatgcgcgacaaaatcactggtgcggccgaactcaataaaatatcgcattatgcagcaattattgaggataagaatgcagaccggtatattctactgaagaaaagtcagctaagcggaggttcccaaaaaccattccagtcaaacgattccggagatttattaatctacacagtaaattcagttacatccgccgccatcggaaagatgctccgaaaaatgagggcagaggaactgaaaaaaaatgaaaaaaatagacaacctcttcctgagttaacagatgaaaaaaaggaaaaggagagtattgaaagatggaaaagctttataaaggagaagggctgggtttccgaattcgagttaaatttggacaataaaacctttgagcagattaaaaaggaagtcgattcaaaatcttatagtcttgatgtcggaagactcagcaaaaatgcacttgaaaaattaattcataatgaagaatgccttcttttaccaattattaatcaggatctggcaagtgaaggaaagattgccaaaaatcagttcacaaaggattggcaaagattgtttgccgatgagccgcagaatttgcgactgactccagaattcagaatctcttatcgacagccaaccccaaactatccagaccccggagagaagcgatactcacggttccagatgatggcgcatttcttagtagattacatcccaaagattgatagttacatttccattcgagaacagacagaaacattcaagaatccagaaaaacaaaaaaaagcagtggcgcagtttcatcaacgtctgaatcctaagagtaaatccgaatcagaccccatcgctcttctatcagcaaaatttgggagccaaattaacaagaaccaagggcgaaaggcgagcacggaggaagctaagcagaaagaggatttttttgtttttggcattgaccgaggacaaaaggagcttgctaccttatgcgtaattgatcaggacaagaaaatcattggtgacttcgaaatctatacccgccagtttaatgcagaaaagaaacggtgggagcatagtttgttacctgaacgccgtcacattcttgatctttccaatttgcgggttgaaacaactctttcgattgatggaattgatcaaaagaaaagggttttggttgacttgagtgaagttaaagtaaaagacaaagagggaaattattctctgccgaataagatgcaaacaaagatgcgccatctggcatatatccggaagctgcaatttcaactgcaaagtaatcctgacggggttttagattttctgtcaaaacacccggaaaaggaaaatgctttagacaatttattagataaagaagaagacgaaaaagggctgatttcgtattacggcgcaggcaatgcgagtgaggatctgccaaaagaggaactctggaatatactcgtcaattttagagaactgaaaaatcaactacaagaagatccggaaaaccaagccttagatcaagaactgagagcactgatagaattggaaccagtcgataacctgaagtacagtgtggtagccaatatggtgggtgtaatagcctatttaatggaaaagttcaactatcaggtttacatcgcattggaagatctaacaaacccgtttgcacctaccaccgtaagtggcatcaccggtgttagtaacaagaatcgccaaggcgaaggaaagaagagtgatgtcgaaaaatacgccgggcttggtctttacaacttctttgagatgcaattgttaaaaaagctgaagcgtatccagcaggaaaatggcaatgttctgcacctggttccggcgttcagggcagtaaagaattatgagaatgtaatcgcaggcaaagacaagattaaaaatcaatttggaattgtcttttttgtagatgccgacagcacttccaaaatgtgccctgtttgtgaatcgacaaatgataagcaaccgaacaaatcaaaatatccagaggcaaagaaggaaaaatccagagaaggaaaagaagtgtgggttgaaagagataaattcaatggcaaagacagaatccgctgttatgtttgcggttttgacacggacaaagattacgatgagaatcccttgaaatatattaagaacggcgatgataatgccgcttatattattgcgacccttgggattaagggatatgaactctcattagctgatttaaacccctaa

SEQ ID NO: 220 - DNA, 3438 bp, unknown
  metagenome-derived sequence
  misc_feature (1)..(3438): Unk52 Cms1 native coding sequence
atgtctgaattgaaatttttaggagattattcttataataaagcaataagatttaaattagaacacaaatgtggagaacttccaaaatttgaaagtaataattccaatccattagatcttattgatttaggtttaaaaattgttgatgattttaaagatttaatatacctaaaaacagaaaaaaacgaactaaaattagataaaaataaatccccaatattaactaaatttgtttctattaaaaagcagtggttaagatattatactaaattagaattttatgatggttctaaaaataaaagtgttgatttttcaataactaattttccatatttgtcagactcttttaaaaaatggattgtggattggacagatgcaataaatcatttaaataatttattacaagataaagaaaatctaatgattagacgatcagaaattgcctattatttattgttaattagtagtaagaattattttaattatataaaagatttttctttttattctaatgataaaaacaccactaaagttgctgaatttcaaaagttaatattaatatttgaagaaaaattaaattcttgtgttattaaatatgccccagcacaaaatgctggtcttcttattgctagtggaagtatgaattattatgctataaataaaaaacctaaagattatgattttgaattaagtcaattgaaaaaagaatatgaaataaaacaagaggaatataatttatttaaagtatataaaagtacccaaaaatctttattatttcaatatattaattctggattagataaagacgaaattttaaaaaaattagcagataattataatttttataaagaaaacaataaaaaaattaaaacattttatagtggtgatagtggtaatgaccttgcctataaatattctagattatttgcagatgatagagcattaacaagtataattaatttaacagataagataaatgaacttaatttaaaactacaaacaaccaacaataataaagatcaaataaaattagaaattagtgcattaaaacagaaacgaggtttctattttataaaaagacaccctcgaaaatctggtgatcctgatttttatatcagtaatgaaaaaaattggcatgatagatacaccttttgtttttcaaattatactaatttttgtaagatttttaaagtaattgcacagaaaacaggtaaattaaaagcaaaaattagagctattgaaaaagaaaaaattgagtctcaaactttaaaatattggtcatttgtagtagatagatctgatgaaaaagaattgtggatggttccaaaagaaaatagaacaaaatttaaggatttattaaaatctgataactctacagatgtaaatatataccaattaacatcattaacaatgagagcattaaataaactatgttttgcagaagaaagttcttttgttaaagatatgccagattatctaaaagatcttcaaaaaaaagtaaaagaagcaacagatgatgagcaaaaaattaaaaatcaaagaaaaaagattaattttagtacagatataaaaacaaaaagcgaacttaaattgtctttttttaaggaacttattaaaagtgagtatgctaaaagcttattagacttatccaaatttaatttagaagatctacaaaaagtaaaagatctaaaagaatttgaaatgcttttagaaaaaaattgttatgttttagaaaaaattggtttatcaaaggaatcttgtgaaaaattaattaaagagtgtaatattttaatatttaaaataacatcttatgatttagaagatagaccaaaaaacacctatcaaacaaaagaaagtgattataaaagaataacctctgaaatatggaatactttttgggaaaacccaggtattaatttaagaattaacccagaagtaaaaataagatatagagaaaaaaatgaagaacatattaaatatttagaagaaaaaggttttgatttaacaaaaataaaaaatagatttattgttgatcaatatacctgttatttcacatttactttaaatccaggcaaactttatcctgaattagtatttgctaaaacagaagagctaataaagaagattcaagaatttaatgatcagtttaataaaattaatttagaaggcacatataaatatggaattgatagagggtctattgaattatcaacattgtgtttagctaaatttgataaaaatgatgtttatacatatacggtagatgataaaacaaaaacaatattaaaaccaaaatttccaaatggagaagaagacattaaagtatatgaacttaaaaaggaactatataataaaaaagcaatttcggatttagagaatttgccaatggaaaaaagaaaaccaaaaagaattatagcaaatatttcttattttatagataagataaatgatccaaattggtttaataaaaaaacagtaacttgtattgatttaactaccgcaaaagtaatcaaagataaaataatagtgaatggagatctactaacctttttaaaaatgaaaaaagaagcagcaaaaagagtattatttgaattggtatcagaaggaaaaataacccctgatcataaagaactaaaatggggatcagaaaatttagaggacccttcttctcgtgaattaagatattacccatatactagtgataaaatagtttatcattttgaaaataattttggaagagatttagaggggttattaataaaagatgatttaatttattcaaaagaaaatgttttaagtaattttcaagtatatctaactgaattattagataataaattagcagataaaaatgaacctaacacgcacacaccaacaattccaaaaataaataatttaagaagagcacttgtttctaatatggttggtgtaattacttatttacaaaaatattatccaggatatgtggttttagaaaatttaaaatctagtgaagaattaaataaatttgaaagaaattatataaatacctcaattccatttgaaaaagcactgattcaaaaattccaaactatggggcttgttcctccgcacataaaaaatttgtgggaaataagagaagagaaaaccaaaaaaaatttgcttgtaaataaacaaaattttcaattaggtgctattttgtttgttaataaagatagaacaagtaaagattgtccatattgcgaaaagccatatacttgggataaagaaaaagctgatgaactaaaatttaaattacatcaatataagtgtgggccagatccttcttgtggttttgatactaaagaattattacctaaatttgattttttaaaagaaatttcagatcctgataaaattgctgcatttaatgttgcaaaaagatggaaagatatagtagaaaatgatgccaagaaataa

SEQ ID NO: 221 - DNA, 3525 bp, unknown
  metagenome-derived sequence
  misc_feature (1)..(3525): Unk54 Cms1 native coding sequence
atggaaacctacaaaacaacaaaaacaattcgctttaaattagaagccgacgacaaaaatattccttacattaaagaggatgtgataaatattcaaacaaataataatgattttaatctcaccgactttatttcggacttaaatatttatttagagaatatcaacaactatttatttgtccaaaaaaaagatggtatatttagcattaatgaaaaaatgaccataaagaatgcttggttgaagcaatatgcaaaacaggaatttgttgctattaaagaacgtacaaatttggaaagcaagcgtagagaacaagttaaaattggcgacataagagagttgatttcaaaaatagaaaaggtttttgattttgttgatcaaacttatgtttctctgatagacaatatttactcagaattaaatgaaagagcaaaaaaagcgcaaataggtttgttgctaaaacgtttggcatcaaaaaatgcgttaccacttttgatggatttgatggaaaacacgtctgataaagaagaaactacagatttaagcattcgaattaaatcaaaatcctctactattcgtagccaattacaagctgctattcaaatgtttttgccggaacaatcaagcggtttacagattgcaaaagcaagttttaactattatactattaataaaaagcctattgattttaaagagaaaattaataaattggaagatagtttacatattaaaagcatggaatctatcaatacttttttcaatagaaaaaaaggaaaacaagatttctatcttaaaaaagaaatttttgacttattaaatactgatatccaaaatgcgtttttggaaaagcaaacatcttgtctttttctcggcgaagttccaatgattgataaagaatatgttagtttgagagatattcttaaaaacataaaagcaaaacaaaaaaaactttttaacgaattaatgcaaaataatagttctcataatgacttaaaaaatagcgaattgtatctttttaataaaatatctaaagagttatttatggattacttgaataaaacagaagagatggaagaggtgggaacggaattaagtaatcaccatctgagagaagaggataagaaaagattaagaagcaagaaagcgagagttacaaaagaacgaggcagtataatgaaagacaactttaaagaatggaagtcttttgcagatttttaccgtatcatttctcaaaagcacggtaaaattcttgcacaactcaaaggaattgaaaaagaagaagttgaatcgcaactattgaaatactgggcgttgattttagaaaaagagaatcaccataaacttgtgcttattccaaaagaaaaagcaggagaatgtaaacaatggatagaaaaggtaaatgagattacaaaactcaataacgaacatgcaaaaatattttggtttgaatcattaacatacagcagtttacaaaaactctgttttggttttgcggaaaatggcaacaatgaatttaatcgcaatatcagacatttgcttcctaaagatgaaagaggaaatcctatcaatggagaatttgcttttggcggagaagagcataagaaaatagaattttacaaaaatgtgttgcaatcagaatatgcccaacaagtgcttcatattccgattgaacaaattaaaaatgagattattttgcacacatttaatagtttagacgattttcaaattgcgctcgagaaaatttgctatcgacgttatgtcgtttgtcctcctaatttggaagatagccttgaacattttaaggcacaggtctttgacattacatcgttggagttaagaaatagtaaaaaaaacaatctcaagtctcatacgcagatttggaaagatttttggaatagtgaaaacgaaataaacagttttaatatcagactaaatccggaaattgccatttcatatcgtgtgccaaaagcaagtcgcattgaaaaatatggtgctaaaagccaaaattacgatcctgaaaaaaagaaccgttttttacatccgcaatttacgcttgttacaaccatcagcgaacactgtaattatcctacaaaagtgctttcgtttgtgaacgatgatgaatacacaaaaatggttgacagttttaacagaaaactacaaaaagagaatgttaaatttgcctttgggttagacaatggcgaagatgaactttctacacttggcgtttatcttccagaatttgaaaaagcaactattgaagaaaaaattgcagaattgaaacaatctcaaaaatatggatttgaagttataactatcaatgatttaaactacaaagaagccgattacaatggaaaagagagaaaaattattcaaaatccttcctattttctaaaaaaggaaaactatatgcgcacattcaataaatcggagcaggagtatgaagatatgttcatcaaattgttttcaaaaaaacatacgcttagtttggatttgactacagcaaaggtgatttgtgggcatatcgttacgaatggcgatgttcctgcactgttcaatttatggctcaaacatgcacaaagaaatgttttcgaaatgaacgaccatacggctgacgaaacggcaaaatccataagacttcgcaacaatgaagaattgacaaataacgaaaaattaaaatttgcagagtatgtttccgacattaaaaaatacgaaaaattatctgttgatgaaaaaactaaatatctaaaatggatttttgaagatagaaacaataatcaattcactgatgaagaacaaaaaacattcaacgacaaatacttaaagaaaaaaggtaattacaattctcctatcatctttgcatcccgttttgaaggtgatgatttacaagatgtaactccaatttttgattgtaggcacgttttcaagaaaaaggaagagtttgacgcaattatgcccattaacgatattgtaacactaattgacagttttaacactaatcgttcaaatcacaatatttcaaatgaagagttggacttaaaaattactgagtctaaaaaagcgcttgctgccaatgctgtaggtgttcttgactttctttataagcaatataaacatcgttttaacggcgaaggattaattgtaaaagaaggatttgatacacaaaaagtaggggaagatatcgaaaaattcagtggaaatatttatagaatcttagagcgcaaactttatcaaaaatttcaaaattatggtttagttccacctattaaaagtttaatgacagtgagaagtgaaggtattaaggataacaaaaatgctattctacagttagggaatattgcctttattgacccggcaggtacaagtcaagaatgtcctgtttgtaaagaaaaaagtaagaaaaagcatacagataactttgattgtcaatgcggattttattcaaaaggaattatgcactctaacgatggtattgcgggttacaatattgcgaaacgtggttttgaaaattttaagaaagaaaaacaataa

SEQ ID NO: 222 - DNA, 3687 bp, unknown
  metagenome-derived sequence
  misc_feature (1)..(3687): Unk55 Cms1 native coding sequence
atggaacctattaaaaatgaattccaactactcaaagcattaggatttggtttaactgccaaacattctgaaaagaaaaataaaacccatgaagaattaatggacttaatccaactatctgaagaaagaattaaaggaaaaacaaagcccaccaacgagattactgaaaagaaaatgcttgaaataatctctgagtgtgtttttttgatgaaacatcatataaacacatgggaaaaggtttacaaccgagcagatcaaataacgctaactaaagaatattacaaagaattggctaaaaaagcctgttttgacgccttttggacagataataaagacaataaacaacccaaatctcaattaattaagctttcttcactgaaaaaacccagatatgaaaattacgaaagaatgggatatatattacggtattggagaactaacatacaaaatctaaaaagaaaaatacatgattttgagttgctattatcccaatacaaattagcattatctaaacaagataaagctcatactaaaccgcaattagtcgatttcaggaaaatgtttctttctatagtcgcgttaatccatgaaactcttatacctttgaataataattccatacaattccttcaattagataaattgccggatggagaggacagcgaaaccgtaaaaacttttgctatagaagaaagagaagagcgtaaataccttgccgcaaaaatcaaagagacgaaggaatattttgaagaaaacgggggatatgttccctacggcagagttacattaaatccctataccgccaaacaaagaccacatattttcaatgaagagattgctgatattatcaaagacttaggtgttgaaaaattaataaaaaaattacaaagtataaatgacatatcaaaatattttgaatttgccgaatctgacaacgacaaaaggaaactcatgaaagattcttcatattccattattgaacgagttcagttttttaaatataaacctatcccagcttctgtctgctttatgttggctgattttttacaaagaacgaaaaaattagaaaaagaaaatgtattggatcttcttaataagataggaatgcaacgaagtatatcaaaagaatataaagataaaaaaagtattaatttagagcagtaccctttgaaaattgcgtttgattatgcttgggaaaatcttgccggacgcatacataattcaacaataccattctctgatcagcaatgtgtcgattttttgcagcaatttggagttgatatcaataatgataatttcagattgtatgcagacttactttttgtaaaaaataatttggctacattggaaaacccaaagaaccaacccaatgacgggtctgaatttattgataatattaaaagaacctttgaaaatataaaactgtcaaaagaaaataacaagcacaaagatgttattttaaactggttgaataaaaacactgaagaacaaaaagaattgaaaaaaggaaacgctcaattattcaaagattatgaaaaggcaaaagaaaaattagggcaattaagaggaatgcaaaagaacagttgtccaaaatataaatccttaactgaagaatttaaaaatctggcaattgactttggcaaaaaattcgccgatttgcgcgacaaactcagagaagaaagcgaattaaataaaataactcattttggagtaattgttgaagattcgcaaaaagatcgttacattttattgggaaaaccggaagacaagttaatacataaatttttaaataatgatcctaacggaaatttaaaaacctataatgttaagtcattaacttcaaaagcattgagcaaaattattaaaaacaaaggcgcttataaagcatttcattcatctcaggtaaaaattgatcgaaaagaaataaaacaaaaatggcaagagtatcaagaccatggcgattttattaattatgtgaaagattgttttgcaaattccccaatgtctaaagaacaaaaatggtcagagtttcaatgcaaattcgatcattgccaaaaatatgaagaaatagaaaaagaattagatgcaaaggcttatctgttaaaagaacaaaatatttctttgcaaacaatcaaaaaacttgtagaacaggaagattgtttgctgcttccttttgtaaatcaagatataacttcaaaaacccgagaacggaaaaatcaatttagtaaagattgggacatgatgtttaaaaaagataacggttatcgtttacatccagaattcaggatattttatcgccagcctacgcccgactatcctaaatcgggcgaaaaacgttactctcgttttcaaatgactgctcgcttactttgtgaatttattcctcagtccgataattatatttcacacaaacaacaaattaaaacttttaataataaagataaacaagaagaagccgttaaagagttcaatgacaaattacatcatcctgacaacttttatgtttttggtattgaccgaggaattaatcaattagccgtactttgcgtattaaacaaagaggggcaaatacaagaaggttttaagatatatacgcgaagttttgatattgaaaaaaaacaatggatacatgaattgtccgaaaaaagaaatattttggatttgtctaacttgcgggtagaaactacaatcaataatgaaaaagtattggttgatttaagcggcattaaaataaaaaacaaggaaggctatcaagataaccgacaaaaaattaaattaaagcaattggcatatattcgtaaattgcaatatcaaatgcacgcagcgccgcaaagaacattggcttttataaacaaatatcatacaccagaagatatgaaaaaacatatacaggaagatataaaagaattgattactccgtacaaagaaggagttaattacagtgatttgccaatcgaaaaaatctgcgatatgttgcaacaatttaaacagtattatgacaaagaggataaaaaatccacaagagaactaactgaacttgattctgctgatgaattaaaaaccggaatagtggctaatatggtaggcgttatcgcctatttattaaaagaatatgattacaaggtttatatttcatttgaagatttgactcgtgcattcggtcgtcaaaaagacggattagacggcagagaattaccccattcaaatgaagacaaaactgtagattttaaaggccaggaaaatgcggcattagccggactcggaacctatcactatttcgaaatgcaactacttagaaaattattccgcatccaacaggaaaacaaagatattttgcatttagtgccggcattcagaagcgttgacaattatgaaaaaattgtccgacgagacaagaaatcagacaatgatgaatatgttaattatccgtttggtatagtgcggtttgtcgatccgaggaatacctctcgaaaatgccctaactgtggtgagattaaaaaacaaataataacacgaagtaaaaacaaaataacttgccgtaaatgcgggtttataacaggcaataacaaccatgacaaaataaaggataataaaaaagataaaaacttacattatattaccaatggcgatgataatggcgcataccatatcgcattaaagacattaaaaaatctaaaaggtcaataa

SEQ ID NO: 223 - DNA, 3633 bp, unknown
  metagenome-derived sequence
  misc_feature (1)..(3633): Unk56 Cms1 native coding sequence
atggaaaaggacaaaattacagcaattagtgaatatcaaacacaaaaaaccattagatttggcttaactgcgacaaatcaaaatctgtattccgaagaaatcatggaattattgaatgtttcggaaaaaacaataaaagaacaagtagaaaaagtaaataatgatattgataaaaacaatcaattaagatattgtttggagcaaataaaaaaatacatagaaacttgggacaatgtttattatcaaattgatttttgggcaattacaaaagattattataaggtaattgcaaaaaaagcaaagtttgattttgacaaaggaaatggctctgaaataaaattatcttccttgcaatcggctcataacaacaggaaacgctatctctatattatggacttttggaaagaaaatttgtataaaacagaaaatttatatcggaagtcagacaatttgttgaaagtatttgaagaggcggaaaaacaaaatcgcaatgataaaaaattgaatgaggtggaattgcgaagaacttttttgagtttatttaatcttgtaaatgaaagtctgaagccattaattgaaggaaatctgtttattgtaaatgacgacaaaattgacgagcaaaattcaaatcacaaatttgtggaggattttatctcaaaaacagacgaaagaaaacagttatatgactgtattacggaattgcaaaaattttttaacggcaatggcggttatgttcctttcggcagaataacactaaataaatggacggctcaacaaaaaccgcatattccaaaagataaaaatggcaataatgaaatagacaaaattatttcctttttaaaaccagaaagtgtttcgatgcaaaatattgattatgagtacgatgcatttgaagataattttgaacagatagataataagtggaaattaaaacagaatgcaaaatctgttatcgaaatctgtcaatttttcaaatataaaaaaatcccagtaaacgctcgcttaaatcttgcaaaacgcttgaataaggacattcactttttaagtgattttggggtttcaaaatcaccggctttggattacaaaaacgataaagataatttcaatctcgccaactatccgctaaaagttgcctttgattacgcttgggaaaattgcgccaaagcaaaatatgaaacaataacttttcctgaacagaaatgtaaggattatttgaaagatgtttttgatttaaatgttgatagcaacactgattttaccaaatatgctttattgttgcgtttcaagattttagtcggaagaattaaagcagaagaaaatacacgaaaagaaaatattgaaactgtaagaagcttattgaaagatgtaaaagataatctttcaaaagaaaaagacaaaacgataacatccgttgaaaattggctcactttcaaagaaaagcaaacagataaaaaggaaaaatacgaaaatcaagacgaattttccaaagtgatgcaaactatcggacaagagcgtggcggattaaaaagtagaatttcaaaatataaaacattaactgaaatgtttaaagtttgtgcttcaaaatttgggaaacaatttgccgatttgcgagattatttcaatgaagcgtatgaggttgataaaattaaatatcgagcttggattattgaagatggaaaactaaatcgttttgtattgcttgccgataaaacaaaagatttgaatttagaaaatgataaaaacggcaatttgaaactttacgaggtaaaaagtttaacctcaaagtcacttgtgaaatttatcaaaaacaaaggtgcttatcctgattttcatatagtcaacaatcggcaaatatatctaaattcaggtggaaaagataatcgtggtaactttattgacgatgtaaaaatccattggagcatatatcaaaacaaccaaaagtttttaaacaaactaaaagactgttttcaaaattcaaaaatggcaattgaccaaaattggaacgaattcaattttgatttttcaaattgcgatacatacgaaaaaatagaaaaagaaattgatagaaaaggatatattcttcaacaaaattctatttcattagataaggtaaaagatttgataaaaaatcaagaatgttttttgctgcctatcatcaatcaagatattaacagagaagacaagcaggcaaaaaatcaattttcaaaagattggaacgatatttttgtaaatacaaaacgcttgcatccggaatttaatcttttctatcgctttccaacaaaagattatccgaatacaaaattcaaaaatggaacagaaaagacaaaacgatattctcgtttccaaatactagctcatttgggttgtgaagttattcctcaaggtaattatttaagcaaaaaagagcagatagccatttttaacgatgatgaaaaacaaaaaggggaagttaaaaaatatatcaatatttgttctgattttgattgtgttataggaattgacagaggaataaagcaacttgcaacgctttgtgttttagataaaaatggcagtatacaaggtgattttaagatatttacacgaacttttaatcacgatacaaaacaatgggaacatcattttcttgaaaaacgcaacattttggatttatcgaatttaagagtagattccccaatcactatttgttgtaatattcctgacgataatcacaaaaaagttttggttgatttggcaagtattcaaacgaaaaatggcgagaatcaacaaaaaatcaaattgaaaaaactcgcttacatccgtgaattacaatatgccatgcaaacgcaagatttgtccgaatttgtaaatagtttgaaatctgccgacgatattacacaagataaaatcaaaaactttatatcaccatacaaagaagggcctccttatgcagacttaccaaaacaagaaatgtttgatttgcttaaagaatgggaaaatgcagatgatgaagaaaaacaagtaattgccgaacttgattccgctgataatttgaaatcagggatcgttgctaatatggttggtattgtggcatttctttgcgaaaaatataactacaaagttcgtattgctttggaagatttaacaagaagttatggtatccaaaaagatgcgttaagcggaacaacaatttttcaaaatgatgaagatttyaargagcaagaaaatcgaagacttgcyggygtaggaacaatgcaattttttgaaatgcaacttctaagaaaattatttaaaattcaggttgataaaaatttacatcttattcccgcatttcgaagtgtagccaattacgaaaaaattgttcgtagagataaacagaatagcggcgatgaatttgtcaatcatccttttggaattgtgtgttttgttgacccaaaatatacatcaaaaaggtgtccgaaatgtggaaaaacaaatgtcgatagaaaagaaaatattgttatttgtaaagaaaagagttgcggctttcaaaccaaagaaggaaatcctttcgaaaagaacaatattcatttcattactgacggcgaccaaaatggtgcttatcatattgcaaagaaagtattgaaaaaagacagcaacaacgaaacaaaaaaataa

SEQ ID NO: 224 - DNA, 3660 bp, unknown
  metagenome-derived sequence
  misc_feature (1)..(3660): Unk57 Cms1 native coding sequence; TGA encodes glycine
atgaaaaattttacaaatttgtatgaggtgcgaaaaacaattaattttgaattcaagccctcttttagcactcaaaaaagagtcttgaaagataggattaaagaaatttcaactttcaaggatgaagataaacatattattgatattatcgatttttttaataataaaaatcaagaagctgtgattcaaacaagagaatatttcaaaaatgagttagatttttttgatacagtttttgaatcttttgttcaaattatgaataaaatagagtcaaaaaaaaattatgagaattttagaatttatgtaaatactgcaaaaataaaactttttggaaaagattttcgagattgttatcaggaaatgagtagagcaagaacaagaaaagggagaggttgggattattattatagttttaatcaagggacacagaaaccagagtttaaaacagttcgatttggagattatattaccattcatcatttgtttgcatttcagtatgataaagaaacaaaaataggagaatttgaaaaactatttttaaataaaattaaacttattaagcaaaaatatgaatattcaaaaattgaaatattagattttttaaataccaaaaatcaaactgagaagtttattactaaaccagagattttagatcgactaaaaaatatggcttattgtttacaagatattctgaaaataataaatattttttgtgatgaaggaaaaaatggatcaaatggggatgcctcttttttaaaagatttagagggaattaggaaattattagaagaaaaaaatattgaagaagtaacaacggagattattaggcaagtaaatcaaattataaatcccaaagctcatcattataagtttacccttaattttaaagctaaaaatccaaatattcagctttctggaaatgatacttttttatcagaacaagaaattcaggaaaagttaaaaactgaaatggacaatttggagaaaaataaaaaagataaatcagattgccaaagttatatttcaaaatttgagaatattattgatgaaatattaattaatgaaatatttaaaaataaaacgaaatttatagataaaataaacaataataaaaaatttattgatgaggcgtgggataaggttaaaaacaaacaaggattccctgacaattttgaagaagtttttttaaaatataaaactaatattaaaacaaaaaaatctttggatacagatattgctagtaatcaaaatgaaagaaataattatgcagttataaatcagctaaaagcagctttaagaaacagtaaaaatactcattttggagtgattttagaaaaaaataagaattattttttagcactagaaagtaagattttaaataaaaaattaaaagcagataataaatatattcttaaaaatttagagaataaaaacaatttttgccagttgcttacttatgaatctttaacctggaaagccgttgaaaaactttgtcttttgccaacttctttgcttaatggaaaaaatgatgagataattaagtattggagcaaattttgcaaaggagaaattattacagagaataaaaaagatggagatacaagagatttgttaaatattccaaaaataagaaaatatttatctgaaattgtaaaacaaaataaattatcaaagttttttaataaaaatgaatttgaaaaatgtgtgactttagatgatatgaaatcatattttgatgataattgttttgtaaataattggattgaggctgattgggatgaaatttataagttagatgaaaatggcaagattgatttatatcagatttttaataaagactttgagcttgaagagtcttttgcaacttctaaaaatgataaagaaatagttaaaagaagaaaatcagcacaagagaaacttggtaatgattttgtttcaaaacaactaaatacaaaacgaagaagaacactttttacaacatattggagtaattgttttgatggctttgataccgaaaaatatcgtttacaaccagaaggaaaagtttgtataagaaatataagtcctataaataattctgtaagatatacagaggaaaaagtgcttggagattttgggatattatttaatccaataacaaaaatagttgatcaatcttcaaaaaagggaaaagagagaattgagaactttaatagttatttacaaaaatctattccaaaagatgaaatgtatattattggtttagatagaggtgaaaacagtttagtgagctatgctcttgtgaagtttaaaaagaaaagattagaaactgatgatataagtgtacgatttgacaatgaaattggagaaaaatcttgggtacttgatgagatacttgaagtcaaagagttatcggcagtaaaagtttttaatcaaaaaggtaaatggaaaaaaagtgaatttgtagaacaaaaagaagattttaactttgttcaaaaaacaggagagaactatgatgaagaattgaataaaaagaacgcagagttcaaaaaagaagaattgaaaaaacaatatcccaattataaaaacaggaaaggagaagataaagaaagagttattattattccgatgagacaaaaggaaaaggagaaagcgtgagttagacaaataaaaacgggggcatattcagtaaaaatttgttcttggaaagaagatgatggaagtatttataattatagagttgcacaagagataattaaagaagaacgatttcgacaacggaaaaaacagaaagaggataaycttattgatactgaaaaatttaaaaatggttatgtatctaattttgttaattttatcgcagcaaaatcagcagaatatggtgcttttgtgtcatttgaaaatctgaatatttcagggggaaaagatggtaatttagagaaaacttttggggcaagtgtctatcaagttattgaaaataagctaatgagtaaattggggtatttagtgcaaaaaagcattccaaataatcacttacaatttgttcctaaaataaaaagaattgaggaattaaataaagatattgtttcagaaaataataagaacaaaaattaccaacttggttttgtgcaaataaccaatgaaactaatacttcgaaactatgtcccaattgtggatattcaaaaaatagatataagtcagcagaaattgaggatgaaatgattaatttggagctaaaagatctaaaattacaaaatgaagattttgggataaatacttttaaaaaaataaaatttcaaatagataacgatataaaagcttggagatatgcaggagtaactacagagggattagatttaaatcataaagatttttgtaaagtgatttctgatccaagacaaaatataaaaaaatcaaaagattttattcgttgtgtgtcttgtgggtttgattcacaatttcctgaaaaaaatcatagtaaatttgaaaaaataaatggtggagatgttttagctgcttacaacatcgccaaacgaggactagaatttatcacacaaaaaaaccaatcatgaccatcctcaatactgcatgcaataattttacacaaaaactggataagtattaagttttgattaaattcactactatttataaataagaaaatctgctataataggtag

SEQ ID NO: 225 - DNA, 3585 bp, unknown
  metagenome-derived sequence
  misc_feature (1)..(3585): Unk58 Cms1 native coding sequence; TGA encodes glycine
atgcaagaatttaaaaatatttatgaaattaggaagagtttgaggtttgagttattacctacaaataatgaagatatcttaaaacctaaaaatatagattatgatttaaatgaatttgtggaaaaattgaaagattttttatataaatttaaaaatactatcttttattattcagaagaacaagatatagaaaaaatgaattttaggaaatgattagaaataaaatatgtttggttaaaaaattatacaaaaaatgatttttataattgaacaaagaaaaaagataaaacatataaattaaatgaaattatttatttgaaaaaatattttttttacttttttgatgaattgtatgaaattattttaaatttggaagaaatagtacaattaccaaaagaaaatcaaggtagaaaatcaaatatagcttattatctaagaaagctaaataagaaagatgtaatagattttatatatgattttttgaaatatatacataatccacaaaatccaaaaacagataaatttttaaatgatttaaaagaacaaattgaaaatataaaaaatactttattagaacttaataagcaatttttacctttacaatcttcttgacttgaagttgcaaaagctacttttaactattacacaatagataaatatagtaaaataaattttgataaacaaatagaaaatagattaaatgaattatataaatcaatatttaaattaaataatcacaggttatttaaggtttggataaataaagaaaaaagaaattttactataacaaacaaatttttagaaaaaatttgattttttgattatttagaaaaagaaagaaattttttaaattttttattatctaagctagaaataaataaagaagaaattgaaaacaaaattaaaatattagataaagtattagtaaataaagattttaaagtattaaatttagatgaagcttatgaattaataaaagaatttaaagcaaatgctaaaagtcattttacttctgatttatgagcttttgaatttagaaaatttaaaataccttatagtaaaataacaaaagaaaataaaaaggataatatagaaggaactttggaaataaactatgaaaattttttaaatattcatcctttgtttgaaataagtgatgatgattttaaaaaattaaaagaattaactgaagaaataaataattattcattaaagaaaaataatattttacaaaaattaaaattaaaaaaatctaaattggaagcacaaataaaatctaaacaaaaagaaaattgagaattgaataaagaagaaaaagattttttagaatatgataacaaaatttgagaattaacacaaaaaaggtgaaaatactttaataaaccttgagaaaaagtatattcttggaattatttttatataaatgaattttttaagaatattgcattagaaagaggaagaataaaagctgaaattaaatgattggaggaagaaaaaaatcaggcaagattacttaaatattggtctttaattacagaaaaagatgaaagtaaatatttaatattaattccaaaaggaaatagatgaaatgtaaaagaaaagttagaagaattttgagaagaaaaaaatgatgttactatttattattttaaatctttgacattaagagcattacaaaaactatgttttaaatctagagaagtaaatacttttatgtgggggaaaaattgagttgcatatgaattattgcaaattaacttagataaaggatatattaatattaataaaaaatgaaaaaaacttttaaaaagatatgatgaattaaaaaatgaagaacaagaagtgatacaattttatcaagatgtattaaaatcaaaaaatgcaaataagcaattggatttagttgattttggatgattagatgaagttttaaataaaaattattcaagtatagaagattttagaattgatttagaaaaagtttgttatgtaaaaattccaaaacagatatcaaaagaagattatgataaattattagagaaaaataatattttagaatttgaaattacttcacaagatttaagaatacaaaaggaaaattatgagaatttaaaaaatcataaaaataaggagcatactaaaaaatggctaaatttttggtcagaagaaaataacaataaaaattatcctataagattaaatccagaaataaaaattttgtatagagaagctttgcaagagaaaaaatgagattataaaaatagatacacaaaagaacaatttacacttactaccactttatgatttaatattccaagtaaaaaatttgattttagttttaatgatactagagatataaaagaaaaaatagataattttaacaataaatttaataaagaatttaattgaccatggtattatgggatagatagatgaataaatgaacttgcaactttaacagtagtgaaatggacagatgaaacttataatacaaattgaatacaaattaataaaccagaatttgcagaaatagaagtttataaattaaaagatgaaaataaaaaattaaaaattataaattataaatgagaagaaaaagaagtaaatattatagataatatttcatattttttagatcaagaaaatttgtttgaaaaaataataacttcaactattgacttaacacaagcaaaattaataaattgaaaaattgttttaaatggtgataaaaatacttatttaaaacttaaaaaattatctgctcaaagaagattatttgaattattttcaaaaaatttaattgcaaaaaatagtcaatttgaagcttgaaaaaaaatattatttgtaaaaagaaatgataataattatgaaccaatttattggtttacagaggagcaaaaaaagaataaagaattacaaaaagatataatagaagaattaaaaaaatatttagaagatttggaaaataaaaatatatttgaggatactgaaacaatagaaaaaataaatcatctaagggatgcaattactgcaaatattgtttgaattatttattttttacaaaaaaaatatccttgaaaaatatatttagaaaatttagaaacaaaagctcctcaacaagaaacttttagttttaaaaaatgaaaatcttgagattatacagaaatagaagaaaaaatgatagatggacattttaggcagtcaaatacagatatcagtagaagattagaatggtgattatatagaaaatttcaagaaagttgatttgtgccttcaaatttaaaacaaacaattttattgaaagatgaatttaaacaataccaatttggaattataaattttataaaagtaaaggcaactagttcaacttgtccttattgtgaaattgttacagaaaataaatgatgattaaaaaaacatataaaagaagataataactgtaaattaaaatcaaattttcaggaagataaagataaaataaaaaattgtatttataaagatctatataataattatcaaattaattatgatagtatagctagttatactattgctaaatttggaaagaaaaatttatttaattaa

SEQ ID NO: 226 - DNA, 3807 bp, unknown
  metagenome-derived sequence
  misc_feature (1)..(3807): Unk59 Cms1 native coding sequence; TGA encodes glycine
atgattaatctagaaagttttaaaaacttgtatgaagtgaggaaaacagtcagattttgattaaatcaacctagaaagaaaagtgatattaataaaacgcattgactattaaaagatttggttgagatttcttttgagagagaaaaaaaactaattaataatgaaaataatcacgtactaattgatacagagaaagttcttatagagaaattacagcaatatgtaaattgactagaagtacaactaaaaaactggaaatgagtatatcaaagatatgatttaatagctataaataaagactactataaaatattggcaagaaaagcaaagtttgatgctatgtgggagattactaaatttgataaaaaatcaaataaatatataaaagttaaacaaccccaagcaagtcaaatttctttatcatcattaaagatttgaaatagaagtgatagtattattcaatattggtgagagataagtcagaaaacagattatttacttaatatttttaaacctaaattagaacaatacgagagggctattaatgatgctaatagtgctcatattaaacctgatagtattgactttagaaaaacctttttacaacttttgaaactaactaaggaatttttacaacctttattggatagatcaattattttcgagctttcaaagaagaaagtttctcaagaaattgaaaagatttctgagtttgcttgagaaaaaaataatacaaaaatttataatgtattgaaaaattgagaagaacttagacaatactttgaagcaaattgatcccaagttccatattgaagagtaagtctaaactattatacagcagtacaaaaaccaaataattttgatcaagaaattaaaaaagctatagacgatttatgaataataaattttttgaagaaaagtgatagtcaaatgatcgattatcttcatcaaggatcaaaacagaaaataaaattgttacttacttcaaaacatccttatcctattgagttattacagttatttaaagtaaaacctattcctttttcagtaaagtataatttggcaaagttcattgagaaaaattataagaatgaaatcagtttatcttatgaagagattttagataaattgaatttgttatgaagagctattgatatcgcaaatgattttaaaaattccaataatcaaaataacttttctcttgatgaataccctgtcaagttagcctttgattatgcttgggaaaatacagcaagaagtttaaaaagaactatacctttcccaaaagaggtatgtaaacaatttttaaaagataattttgatgttgatgtcgataatgcagattttaaattatatgccaatcttttattcatagcggataatctagcaattattgaatacaataatccaaataatgaagtagaacttataaataagataaaacaagcatttgactctatagacttttcttttgataaagaaagatattgatgatataaaaatgatgttttagtattgctaaataaggcaaaatctcaaagagactattccactatattaaaagcaaaacaagaattgtgattattgagatgatgactgaaaaataagattaaaaaatacagagatttaacacagagattaatagacaaaaagaattcacatttttgaatcgcgagttttgtaggaaaaacacttgctaaaataagagatcgactcaaggaagaaaatgaactcaataaaatttctcattacggagtaattcttgaagataaaaatcaagataaataccttcttatattacaacttgatggaaaagatacaagagaaaaaatatctcaaaaacttggcaatggagacataaaggtgtatcaagtaaattcttttacttcaaaagcattaaataaatttatcaaaaattcttgatcggaagatgcaaaaaaatttcactgagattttagatataaacataaagaagtttcaatatatgatgaaaaaggaaaatggacatgatatcaggaaagttttttaagtcatataaaaaagtgtttaattgactctgagatttcaagagaacaaaattgggaagcctttggttggaattttgctggttgtaatacttatgaagagatagaaaaagaaattgattctaaatgatatcagttgactgaaaactctattttaaaagagactttaggaaaattgctgaaagatgaaggttgttcgttatttcctattattaatcaagatatttcaagtcaaaaacaagaaaataaaaatatttttactttagattttgaaaaggtatttgagtgaaaagaatataggattcatccagaattttctatcttttatagaaagcccatggaagaacacgagaaggagaataaatcgtgaatcataaatcgtttttgaaggttacaattattggcaaatcttggtatagaatttattccaagaaattcttcttttaaaacaaaaaaagaacaaaatagaattgcgattgatcaaaagaaacaaaatcagttagtccaagagtttaaccaggaaaaagtaaatacatattttgaaggattagataattattatatttttgggatagatagatgaatcaaacaattggcaacattatgtgttactgataaagattgagttatacagtcctttgatatttacacaaaattttttgattctaaagaaaaaatttggaaatatacaaaaactagaacggaaggtgttcttgatttgacaaatcttaagatcgaatctgataaaaattgaaatacttatatagttgatatttcgttatttgatgcaaaggatgaagattgaaatcctacaggtacaaataaacaaaatattcaacttaagcaactggcatatatcagaaaattacaatatcaaatgtctgcaaatgaagaatgagttttaacttttttgggaaaatataagaacaaagaggaaagagaacaaaatatgaaaggactaattactccatataaagaatgaaaaaattttgcagatttaccaatggatatttttcaagaaatgtttgaaaattattatagattaaaaactgatcaaaatttgtctgaatctgagaagaaaaatcttatgaagatcactacagagcttgatgcaagtgaaagcttgaaaaaatgagtagtcgcaaatatgataggagtgatttattatttgatgaaaaaatatgaatataaagtgaagatttctcttgaagatctttcaaatgcttggtttttttcaaaagacggactttcttgagatgttgtgctaaatacgaaaaatgatgaaacaatggatttaaagaaacaagataatctagcgcttgcttgagtttgaacatatcatttctttgagatgcaattattgaagaagttatttaaaatttctaccgaagaatgagttttgcatttagtcccaagtttttgaagtgtaaaaaattatatagagattatgaagataaaaggaaaatatgtatacaaacaatttggcattgtttatttcgttgatccaagaaatacaagtagaaaatgtcctgtttgttgaaagtgatgaaaaaaatatatctcaagagttgacaatattgtaacatgtaagaattgttgatttgatacatcatcagacaattccatccttataaataattatgaaaaacaatgaaaaaaacttcattttataaaaaattgagatgataatggtgcatataatatttgagagaagataagagaacttccaaaaaaatcagatgtaaagaatacctcgatttcatgaaatatttctttttcatag

SEQ ID NO: 227 - DNA, 3324 bp, unknown
  metagenome-derived sequence
  misc_feature (1)..(3324): Unk60 Cms1 native coding sequence
atgaacaaaaacaatatgcaaaaaatgcgagattgtaaaattccttttgaacttaggaaaacaattagatttaatttgcaaccaaaaattttaaaaagacctcatgaattgacagaaaacgacaatgatagtttgactgaacagattgcgaagtttactaatgaatatgaatttgttattcaaaacttagagaggctggtattttttacatctgaagatggtcaaaagaaagagttgaggaaaaaagtttatgttaagcacgcatggcttaggaattacacaaaaacagaattttatgatggcaaggactgtattttatataataaaaatgggataaaaagaagcaatcaaatttcaattgctgacaataatgtaaagtttttagaaaattattttacaaattggataaatgaaaataatgagtgtgttcaaaaattgcaaagatacttggagcgaccggaatataaacaaaaacgattttctgaatttgcttattggattcaaaaagttttgaagcgcagcaactttgaagctatttttgaattatttaatagtaatattcaacataaaagtagcgataaagatatatctgcgattaaaaaagaacttgttgcaatcaaaccgctcttaaaatctctcacaaatgaacttttgcctagtcagtctctgggcgtggaaattgaacgagcaagttttaactattatacggttaataagaagcctagaaattatagcgaggaaataaaaaacaaagaacaggaaaaaaacaaaaaattattttcttttaataagcaaagtaaaaagatgtttattttagataataagattaaatttttgaaagaggatatcagacagttgaatgacgattattttgttgaagagatttttagtaaagagaagaaggtgattaaagattttaaccacttaaaaataagtaaggcatataaatttttgaaagaatacaaagcaaatgaaaagtcaagattttacgagttacttgaaagtggaaagacaagtgaagagataaaagcagagtgtccattgtttgaatgttcggataaaaattttaataaaatcaaagatctgacaaatcggattgaaagaacaaaagatgaagatcttagggaaaatcttaaggaagaaagaggtaaacattttgatgttgttggagaagaaggtaatatgtgttcttttgacaaatataaaaaattttgtgccttattccaaaaaattgcgatgcaacttggtcgtgttaaagcaaatgttaagtcgttggaaaaagagaaaattgatgctgaacgattacaatcttgggcagtgattttggaaaaagataatcaaaaatatatcttaacgattccacgtgattcttggggcaatttgcgtgaggctaaatggtttattgatagtttacaaaatgaaagtagcacggaatggaaattgcattcttttgagtcgctaaccttgcgggctttggataaactgtgttttggttcggataacactttttctttggcgattaagggtgagttaaaaataaaaaatagtgtgttttttgatggagaaaaaataaaaagaaaagatcaattttccaaggatggtttggaattaattcggttctatcaaacagttttagagcttgagacgacgcgcaaaactttggcgatagaaaattttaagggattggcggaagttattgaaaaagattatgagaataaagaggactttgaaaaggatttaaaaaaggcttgttattacaaaaaaaccgttttaatttccgagcaaaccaagaatgaaatcattgaaaagtatcaaggaaatttgtataaaataatcagctatgatttggaaaaagatgatcatgaagacattgcgaaattagacaataagaaagaatttaatagaaacaatctggaaacccataccaagtattggttgtatttttggactagggagaacgccaagagtaactatcatgttcgtttaaatccggaatttagaatcaattttgtagaagaaagaacgggagagttagagggtaagcaattaggagcgttaaataaaaatagaaaaaagaataataaattcttactttccacaaccataactctctgggcacacgagaagaacattgatttggctttcaagacaacagatgagatttctgggtttattgattcctataataaaaagtttaatcaaaagataaagccttttgatatttattattacggattagatcgagggaaaagggagttgttaactttaggtttatttaagttttctgaaaccgagaaggttcaatatattatggaaaatggagtggttggtgaatataataaaccggaatttattgatatagcggcctatcaaataaagccggaaaagtatttagaaaaaaatgacaaagggagagttgtgtacaagagcgcttctgaatttgtggaagattctgatgtggtcgaaaagatatcaataaaatcttgttttgatatgtcttgcgctaaattaattaaagacaaaattattattaatggagacattgcaacttatcttgagttaaagctagtaagtgctttgcgaaaaatttacgaaggtacgacacgaggtaaatttatgtctgataatatttgttttgacgcagaaaaaggagctttatttttgaatataaaaaataagggagaattaaaaaatgaatatttatacttctatgatgatcggtttaaaaacatcctttctttagaaaaaattaaagaagaattgcaaaattattacgatgctttgcgcgagaaaaaagccgttgaaattattgaaatcaaccgaattaacaatcttcgcgacgctctgtgtgccaatgctgtcggtattttaagctatttgcaaaaacggtattttggaatgatgtgttttgagaatcttaatcttgaaaataaaaataaacgtataagcgagtttgcgggctttttggcaagtagaattgaatggaaattactacaaaaatttcaaaccctttctttggttccgccgatttacaaacaagccatgacgctgcaaagcaatggaaaaataaatcaattggggattgtcgcgtatataaatacggaaggaacaagcagtgagtgtccgcattgtggaacaaaaaattctgataaatcggataaatggcacagtcatgcctataaatgtaaaaatacgcattgtaattttgacagtagtgataaaacaaagagaaggggacttgtcgggttggataattccgacagtgtcgccgcttataacatcgccaagcgtggtttacagaaggtagtagaagggacggtgtaa

SEQ ID NO: 228 - DNA, 3447 bp, unknown
  metagenome-derived sequence
  misc_feature (1)..(3447): Unk61 Cms1 native coding sequence; TGA encodes glycine
atgactatggtaaatctagaaagttttaaaaatttgtatgaagtgaggaaaagtgctaggtttaaaattgttcctaaaaaaattttcagacagaaggaagatagaggtagtatttataatacagaagacatagtaaaacagtataaaggtattataaaagatttagaaagcatattgtactatgaaaattttgttcctgaagccgaacctttgagtaataaattatgagatttatgtgatttttctaaatttgaatctgagttagaagaaaaccaagaaatatcttctttgaaaaataaagaaagttctgatttgattcgtataaaacatgcttggttacaaaaatattttacaaacgattggcacgaaaataaagactttataatttctaaaaggctggatcgcaagagaaatatagaaataaaaacgaagaattggacaactatttgaagtgtaaattttctaaaagaattttttgaaaatttttttacagatgctaataaatattttaatgtcatatcaaaactacttcaagtgcaagattttgaaaaaaatagacaatcagatataaaatttgcattacaaacaattcaatgaaaagatcatttatataaaatatatcaactttttgaatgaggatatattgaacataaaaatgataatacatcaatcaatgagttacaagaaaaattaaaagtattcaaaaataatgtaaataattatatagaaaattgcagaataaacgactcttttggacttcccttggaatatgttagcttaaattattatacaagaagaaagactcaaaaagattatgatgaagaaattcttaaaaaatcagagtccttaaaaaagaaatttgattgagatttatgagaattatattgaattagtaaagaatcagaaatttcagatttatacaacaatatgaaactgttcaaagcaaatcaaaagagtgcttttttacagttattgcagagtcagacacctttttcaaaactaaaaaataattttgagtatattgataataaaggagaaaggtactccgattacaaaatacaattgtttaatgatataacagaagaaaattataaagaaatgaaggatctaacttcaaaaattgaagaatcagacaataaacaaacaagaaaagcattgaaagagaaaagatgaaagtattttttattccattgtaaaaaatataacaatttctgtgattattataaaaaagtagctatggaattctgaaaaagaaaagcagaaatattgtctttagaaagagaaaaaattcttgccgaaagagaaagatgatatggatttttatcaagggacgctagtaataattattatataaatacttttgatatagaaaatacaaaaaatgcttatgattttttctcaaatcagtctcaaaagcaatgagagattacctattatattttaagttcaattactttaagagctttggaaaaattatgtttttcaaaatcttctaatttttataagtgaaatattgttcaaaaaatagatgaaaaattcttaaaaattcaagaagcaacaggaaataaaatttttaaaagtaaaagagaacttgaggaaggagaaaatttaattgaatttttggcagaggttctcagacttcaaaatacattatgaataaaatttaaatcagaaaaatcattagataagctcaagggctgtgaaaacatatcagattttgaaattttgttaaagaaagaaacatatattttggatgagtacaaaatatccaaagaagattttgaaaaagcacttgagaagtttaaatgaaattcttttcttattattgataaagactccgataatcataataaaaatagcgtattctctcagtggtggactagattttggaaaaaaaataatacagagaattatatattaagaatcaatccagagttggttatttcatttagaaaatgagacgaagaaaggtttaaaaataaaatatcatttcatagaaagaaaaatgatagttatatgctaacttttaatttttctcatttttctgataaatcttatattaattcagaatttatagatgacattcaaagaaaggagaatttagagagatttaataatttatacaataataatgtagatttagactacttttattgaattgataaatgaacaaatgagttagtaactttatgaatttataaaaaaaattgaggattgatggattcagtcaaaataagtgaaaaaataccagtctataaaattacaaataaatgattagctcattttgaatatatagtaaatgaaaaaacgtgaaaattagttattgataaagatacttgagaggagaaaaaaagatatctatcaaaaaatgtttcatattttataaaagatttagaaaataaagaactatttgaacagttagaaataagttcttgtttatgagatttaacatatgcaaaaattattaaatgaaatattattctaaatgctgatatttttaccactgtcaatttatacaaggtaacagctaaaagatttcttaatgatgcgacttttagagggaagataaaaaataatactgtattatttgatgatgaaaataaaagtttttattttgaatacgagaatagatgaaagctacaaaaacagaatatattttattggaaggatgattttgattatttgccatgtgatgatatatttcagaatctaaaagaagaagtagaaaatgaacttaatatgtatttaaccagtatttcaaatgaagaagatatctctatgcaaagagttaataattataaaaatgccatctctgcaaatattgttggaataattactgagttacaaaaacattttaatggatatatttgttatgaaacactggatgcaggacaaatagaacaaaaatgattgaatacttttatatgaaatactcttaacgaaaagatttataataaattacaattaagtttagaagtcccgccaattttaaagaaatttagaactgatatttgaacgaaagaaataattcaacattgaaaaattatttatgttaacgaaaaaaatacttcttcagcttgtccaatttgtaacgagcaattattaaattgaaatctatctgataagaaggatgatgaagtttttaaattatgatgacatttaagtgattttgaaaataatatgaaacatttaacagatctagactatcaggaatggttaaaaaataaaagttttaaaaaagctaacactaataaaaaatgagaaatagaaaaaaataaatacaattcttgaactataaattgaaaatcttgtgattattatattggaaatgaaaattatccagaatttgaatttataaaatcatgagacgatcttgctacctacaacatcgccaaaaaagctaaggaatatttagaatctttgtcaaaaaaagaagactcagaataa

SEQ ID NO: 229 - DNA, 3372 bp, unknown
  metagenome-derived sequence
  misc_feature (1)..(3372): Unk62 Cms1 native coding sequence; TGA encodes glycine
atgttagaaaatttaactaacctttatgaagtgatcaagacattaaaatttgagctcaagccaagcaagtttactttaaaaagatgtgattttgatagggcttttgaagctgatcctcatgctttatttgaaaaattaaggtcagtacataggtttcaagaacaaatcctcgatttattatgaaaaacatcttctaaaaaaattgtaattcataaaaatttaataaaactgattgatgctgattatttttatcaactaaaatcaaaagctattagctcaaataatactatagctgttcttagtcaggatttccaagaagagtttttcaattatatcaaagaaaaatttaatagattacattcaactaattacagtcttgattatttactttgggcagattatttagaaaatcctacaactatagataaaaaacctacgaaatcagaaatagcttttgctacaaaaaggtatgttcatgcaattgaaaaagtggaagaaattctatctaatttaatttataaaacatgaaatattgatagagaaattgaaagtttgctagctaattattataataatcaagatttgaaaccacttttaaaagtagcaaagagctatctacaatcatatagtccaacaagctgatttcaggtttcaaaatttggatttaatgcaaaagcaatccaaaagaaagttgatgtagaaaaaatggagcaagagatttgatctttagaaaagaaaatgcttgatttggaggagaaaaagattatagccacgcaaatttttgatgattatgccaaaaaatttgtacaagagaagataaaatctgatcctaaattgttggctcttagagagaatcaaacagctagtcttgatgaaataaaaagagcaaaagaatatctaaaatatttgaaagagtgagattttgattaccaaaaaattttaaaagaaagaagtaaggcaagaaaggaaaaaagggattctatgattaaatttacttgagatagagagtattgtgaactaaaattggcaaaaactgatgctagtgtggtatacggtagagcaaaacaagctttttttgccaaacaacaagaactatattctcaacaggctttgacccattatgcgagaatcttgagaagtgaatgaaattattttgtggcaatgatagatagagatgatgtatcttttttagagcgtttatgaactaatgataaagtaaataatgaaaaatttgaaattttaagatatgcttcattgacagcaagagctgtagaaaagttaatttttgaaaagaatgctttaaaatttaatatatatgacaaagagtataaagaatgtaaaatgatccgagaaaaaagatcctataaagagaaatgaaatgaagattctcgctcaaagaatgaaaaacaaaaggaaaatttaaaaaaattagtcttatttttaaatagtgctattgaacaactaaataaaaaacttgaatgatgaatctttgattggaaaccattcctaatttgaaacgattttgataatttctctgaatttcaaaaatatattacagaaaactgctatattgcgagacgagaagctattgataagcaaacaatttacgatttggatcaaaaatgaaaactaaatttttaccagatctttaataaagatttttcagttgatccttattgtgcaaccactgaaagagacagaagtagtacaataaaaaacataaatttacaatctaaaaaaaatctttttactttatattggcaatctttatatacagaaaacagttgaacgattagattaaatccagagtcaaatctttattttcgtccatctagagtccgtacggaaattgatttatgtaatgattgcgaagcaagtaaattgagatatagacaaaacaagattatcggagattttcaattggtattttatccgactaaagaacttccttttgatcaattacagcaaaagattttaaaaaattcagaaaaatcctatgcgatagggatagatcttggagaaaatagtttggctacgatctgtcttgttgacaatgaaaagaaggttgttttagatggaaataataaaccgatcatcaaagacttatctatgatcaacaataaatgagattttgtagaagtggaagactgttttattgattgaaaaccgtatgaaaggaagcaaaaattattgatttgagggacagaaaccaagccttatatgttaggacgacattttcctaaacatttgcaaaataaggtaattgcagaaatgtcgcaagatatgctttttgaagtattgcaaatattggaaagtttggctccagaaaagctttgaattgttgataagcaatgaaataaagtatttgattataattacgcatttgaacatttaaaggctataaacaagattagatatcatctacaagtatttaaccatactaatgatgaaatgagaattctagaaaaagatttattagcaagtattaaaatcaggtgatgatttgtttgaaagattgtttcatatattactcaaatggcaaaaaaatataatgctattatcgtattcgagaatttagatcaagaaattggtagaatcaaatgaagatatcttttttcagaacagtcttatgctaaagtttctcctaaagaagagagaatgtataaaggaatctctccttatcaattgatgcaggataaaattatccaaaaatgcaattatctcttaacaaagcaagaaatcaaaggttgaatgcaaatttctcctagactaaaaagacaagaagatattaagcaattaactttactaaaagataagaattgtgcttggggaaaaatcatttttgtcaatgaggaagattcttctaaagaatgccctaattgtggctttgtcccttgaaaatattcaagtaatatcaatattaaagacgattgaattgagcttatggcaaacaaaaaggataaaaaagttttctcttttgcagaaaatcagcttttgtctgaaagacgagaggcttatcaaaagatttcagatattgataaaaagaaagctcttttaattgaaactagagtatgaaagacatttttaaaatcttatatggatattcaaggagatccaatgatttgtgtgaactgcggatatgatacgagaaaaactaagcgagtagaaaaatataacttaaaaagttgtgatgaaatagcggcatacatcatagcaaaaagatgattggaatttatggaaaataaatgatatgagactcaagaagtatctatttcagttggatgagattcttacaacaagccatctgatggagaacaagatgattcttgtgcttcaggagttaaactttcatgaaatatttctttttcataa

SEQ ID NO: 230 - DNA, 2721 bp, unknown; identical to SEQ ID NO: 182
  metagenome-derived sequence
  misc_feature (1)..(2721): Unk63 Cms1 native coding sequence; TGA encodes glycine

SEQ ID NO: 231 - DNA, 2733 bp, unknown
  metagenome-derived sequence
  misc_feature (1)..(2733): Unk64 Cms1 native coding sequence; TGA encodes glycine
atggagaaaaattataagagtgaaatcaatttatcttatgaagacattctaaataaatttaatttattatgaagagctattgatatcgcaaatgattttaaaaattccaataatcaaaataacttttctcttgatgaatatcctataaagttagcctttgattatgcttgggaaaatacagcaagaagcttgaaaagaactatacctttccccaaagaggtatgtaaacaatttttaaaagataattttgatgttgatatcgataatgcagattttaaattatatgccaatcttttattcatagcggataacctagcaactatagaatataataacccaaataatgaagtagaacttataaatgaaataaaacaagcatttgaatgcattagctttccttttgataaagaagtatataaatgacataaagaagctattttggaattattagataaagaaaaatctcaaagagactattccactatattaaaagcaaaacaagaattgtgattattgagatgatgattgaaaaataagattaaaaaatacagagatttaacacagagattaatagacaaaaagaattcacatttttgaatcgcgagttttgtgggaaaaacacttgctacaataagagatggtttaaaggaagaaaatgaactaaataaaattagtgattactgagtaattattgaggatagtaatcaagataaatatctacttactctagagctaaatgggaaagatataagagatagaattagaaatagcctatgaaactgagaatataagacatatgaagtaaattcctttacttcaaaagcattaaataaatttatcaaaaatcctttatcagaagacgcaaaaaaatttcatgggaaatataaggatgaatatagtttttgatatgaaaataaagattgagatttcacttataaaataacaaaagtttcaaaatatgatgaacaaggaaaatggacatgataccaggaaagttttttaagtcatataaaaaagtgtttaattgactctgagatttcaagagaacaaaattgggaagcctttggttggaattttgctggttgtaatacttatgaagagatagaaaaagaagttgattctaaatgatatcagttgactgaaaaccttatttcaatggggaatttaaaaagcttggtaaaagatgaaggttgcttgttatttcctattattaatcaagatatttcaagtcaaaaacaagaaaataaaaacatttttactttagaccttgaaaaggtatttgagtgaaaagaatgtaggattcatccagaattttctatcttttatagaaggccaatagaagaacacaagaaggagaataaatcatgaatcataaatcgttttggaaggttacaattattggcaaatcttggtatagaatttgttccaagaaatccttcttttaaaacaaagaaagaacaaaatagaattgcgattgatcaaaagaagcaaaatcagttagtgcaagagtttaaccaaaaaaaagtaaatacatattttgaaggattagataattattatatttttgggatagatagatgaatcaaacaactagcaactttgtgtgttactgataaagattgagttatacaagattttgatatttatacaaagcactttaatagtgaaagtaaaaaatgggaatacaaatttcatagaaaagattgaatattagatttaactaaccttaagattgagtctgatagaagttgaaataaatacatagtagatatatctttatttcaagctaaagatgaagattgaaatcctacaggtacaaataaacaaaatatccaacttaagcaacttgcatatatcagaaaattacaatatcaaatgtctgcaaatgaagaatgagttttaaattttttgggaaaatataagaacaaagaagaaagagaacaaaatatggaagaactaattactccatataaagaatgaaaaaattttgcagatttaccaatggatatttttcaagaaatgtttgaaaattattatagattaaaaactgatcaaaatttgtctgaatctgagaagaaaaatcttatgaagatcactacagagcttgatgcaagtgaaagcttgaaaaaatgagtagtcgcaaatatgataggagtgatttattatttgatgaaaaaatatgaatataaagtgaagatttctcttgaaaatctttcaaatgcttggcttttttcaaaagacggactttcttgagatgttgtgctaaatacgaaaaatgatgaaacaatggatttaaagaaacaagataatctagcgcttgcttgagtttgaacatatcatttctttgagatgcaattattgaataagttatttaaaatttctaccgaagaatgagttttgcatttagtcccaagtttttgaagtgtaaaaaattatatagagattatgaagataaaaggaaaatatgtatacaaacaatttggcattgtttatttcgttgatccaagaaatacaagtaaaaaatgtcctgtttgttgaaagtgatgaaaaaaatatatctcaagagttgacaatgttgtaacatgtaagaattgttgatttgatacatcatcagacaattccatccttataaataattataaaaaacaatgtaggttttttcttcacaaaaaaactagactttttagtctagtttttcaaatatatcatgataatgttccaaagtgtaactag

SEQ ID NO: 232 - DNA, 3312 bp, unknown
  metagenome-derived sequence
  misc_feature (1)..(3312): Unk65 Cms1 native coding sequence
atggaaaaatatcaaattacgaagagtatttcttttcgattgaataaagtaaaagctcccatattagaagagcaagttgaaaaaatcggagatgtgaaagaagcagaagcaagtctattgaggcttttttcagtgggacaggatttagcaggactcttaaaacagtatatttataaagacaatcagaaacttaaaagctctgtaacggtgcattttagatggctcagagattatacaaaagataaattttataattggaaaactgaaagcagaagagatttttctagagaaaagagatttaaactttcagaagttgattatctgaaagaagtattcgagcattttatttctgattgggataccattattcaaaatttgggttcagaaatttctcgcaaacaagaagcactttcacgcaaagcggagatagggaagattattaaaagaattggaactagaaatgtatttctttttttcgagaatctcataattgaaagcaaagataaaaatgaaattcatttagaagcccagctaaatgagaaaataaaagtatttaaagaaaacttaatcaaagcagaacaatgggcgttacccgcacaatcggctggaatagaattagcaaaagcaagttttaattattatacaatcaataaaaagccaaaggattttgaattagaaaaaaggaatctagaaaaacaattacataattatgacgagagatttatgaaagacattgcgcaaagagagaacaagctttttggcgagctaagaattatagaaaaagatgatgctacgaatatgtatagatttctttatgaactgattcaaaatggcgaaggaaaacaagtattagagaaaactgataaaggtttaacggttgatctcgattcactttacaaaaatttgaaggtatttagagcagagcaaaaaaagtcattccaagaggcagtttctaaaggatcatcatacgatgacactgcaaaaataaatattctatttagctcagtagatcaaaagaataatgaaaagaatttgaaagccttcaataagtataaagaattcacagacaccatacaaaaattggctgaccagaagaataaagtagaaagggattctctaaattctcaaaaattacaagaagaaattagtaggatcagacaatataggggaaaattattatttcaaggacctagcaaaagaggagaaccggaagaacgattcgataagtatttaaaattttgcaaagtctataaagatatcgcactcaaacgcggtcgcttggttgcccgactcaagggaattgaaaaagaaaaaatagattcgcaaagattgaaatattggacttttatagtagaaaaagacaagcaacatcaattggttctgattccaaaatcacaatcacaaaaagtttatcaaaaaatttcatcctatgaaagcttgggagctggatcttcggacatctattatttcgaatctttaacctatcgagcattgaaaaaattatgcttcggagtaaatggaaatacattcattccagaaattagtgaagaactaagaaaagcagggaaatggaattacgaagaaagagatttcggagagcatatatttaaaataagaagtggtgttgaagaaataagagatgaaaaaagattaatcgctttttacaaagatgtgcttggaacagattatataagaaaaaatagagagggaggaaaaatagtattaccttcttcttttgatgaagaagttttgattcctgaattctctacagagcaagaatttcacgcagcattggaaaaatgctgttatcttcgaaagaaaaaaattccaaaggatgatattgaaaagatattttctgaatgtagtgcgcaaatctttactattactagttatgatttagaaaaacaaaacaaaacaaatttaaaggcacatactaaactctggttcgatttttggacgggagaaaatgaagcacaaagatttcctttaagactcaatcctgaaattagaattctatggagagaaccaaaagctacaagagttgaaaaatatggcaaagattcaaaactgtttgatcccaaaaaaagaaaccgctacttacatccgcaatttacattgactacatcttttattgagaatgctctgcatcctgaaatcaattatcgtttcttagacgcaaagcagaagaaagaaaatgtaaagaaatttaacatggatatatatgcaaagttaaagccgttgcccaaagcttggtattacggcattgatacgggaatagttgaattagccagtttatgtttgattcaaaaaaacggtataccccaaacttttgaagttcttaatctaaaagaagataagatgaattatgacaagacaggttatctaaaagatggaacaaaaaagaaatataaagcgattcaaaatctttcctattttttaaatgaagacctttataaaagaacctttcaagatgaaagttttttggatacatttgcagagatatttgaaaaaaaagaggtgtcagcacttgatttaagtgtatcgaaaatcatttctggacatatagtaatgaatggagatattacggctagattaaatgtagcgttagcaaatgcacggagaaaaattgtagatgctcttattaaaaatccttccgttcaactgagcgaacaggattataatattaaagttggcgatgaaattattttcaaaggaagaatagaattcaatgcaattaaatcatgggaagatattcaagcaataattcattcatcctttgagaaagataaagagaatttagccagagttcaagaagatataaataagtatcgtcaagtaattgcagcaaatgttacaggagtaatccactttctttataaaaaatttcccggacttattacaattgaatacctagatcaaagtgaggtagaatcacatcgaaaagattttgaagggataatagataatccggtagaaagagctttgtatagaaaattccagacagaggggctgactccaccagttagtgaattgtggagtatcaagaataaaaatgaacagattggtatcatctattttgcagatcctaaagacggaaagaagggagcgcatggtatacgatgtccaaaatgtggggaaaaagcatatcctcgatcagaagatgatggatacaaaaaagataagaataataaaatcttccaatgcaaacaatgcggctttcacaacctcaacaattcaatgggcttattgggattagactctaacgacaaagtcgcggcttacaacatcgctaaaagaggattggaaatttaa

SEQ ID NO: 233 - DNA, 3816 bp, unknown
  metagenome-derived sequence
  misc_feature (1)..(3816): Unk66 Cms1 native coding sequence
atgttagaaagttttaaagatttatatgaggtgaggaagacagaaagaatctgacttactcagccaaataaaaaatgagaaaaaatatctcacttagagcttaatgaactagtaaaaacatcacttgaaagaataaaaagtgatatagacaaagatgataattctataataaaaaatgaaaaaaatttaattgagaattcaagacaatttgtaaatgaattaaatgttcagttttgaacttggaaaaatatctataaaagatatgacttaatttcagtaaacaaagattattatagaatactagctaggaaagcaaaatttgatgctttttggaaagaaggacgcacaaaatacccaaaagctaatcaaattactttatcatcattacaaaaatgaggaagaaaggaaaagataatagaatattggaaagaaataattgaaagaagttattatttaataagtatttttacacaaaagctagatcaatatgaaaatgcagtctcaaatccagaaaaattatcccacacaaaacctgattttacagattttagaaaaatatttctacaacttctaaaagtaagtgaagactatttaaagcccttatttgataaatcaattaattttaaaacttgaaaaaaattagaatcagaagaagatataaaagaaataaatttatttatatctgaggaaaataacaaaaacatctattcattactaaaattatgaagtgatataagagaatattttgaagaaaattgagcacaagtaccatataaaaaggtaagtttaaattactatacagcagtacaaaagccaaataactttgaatgagaaattaaaaaagctatagaggatttatggatagttgagttcttgaataaaagtgatagtcaaattatcaattatcttcatcaaggatcaaaacagaaaaaaaaattattacttacttcaaaacatccttatcctattgagttattacagttatttaaagtaaaacccattcctttttcagtaaagtataatttggcaaaatttatggagaaaaattataagaatgaaatcaatttatcttatgaagacattctaaataaatttaatttattatgaagagctattgatatcgcaaatgattttaaaaattccaataatcaaaataacttttctcttgatgaataccctgtcaagttagcctttgattatgcttgggaaaatacagcaagaagtttaaaaagaactatacctttcccaaaagaggtatgtaaacaatttttaaaagataattttgatgttgatatcgataatgcagattttaaattatatgccaatcttttattcatagcggataacctagcaactatagaatataataacccaaataatgaagtagaacttataaatgaaataaaacaagcatttgaatgcattagctttccttttgataaagaagtatataaatgacataaagaagctattttggaattattagataaagaaaaatctcaaagagactattccactatattaaaagcaaaacaagaattgtgattattgagatgatgactgaaaaataagattaaaaaatacagagatttaacacagagattaatagacaaaaagaattcacatttttgaatcgcgagttttgtgggaaaaacacttgctacaataagagatggtttaaaggaagaaaatgaactaaataaaattagtgattactgagtaattattgaggatagtaatcaagataaatatctacttactctagaactaaatgggaaagatataagagatagaattagaaatagcctatgaaactgagaatataagacatatgaagtaaattcctttacttcaaaagcattaaataaatttatcaaaaatcctttatcagaagacgcaaaaaaatttcatgggaaatataaggatgaatatagtttttgatatgaaaataaagattgagatttcacttataaaataacaaaagtttcaaaatatgatgaacaaggaaaatggacatgataccaggaaagttttttaagtcatataaaaaagtgtttaattgactctgagatttcaagagaacaaaattgggaagcctttggttggaattttgctggttgtaatacttatgaagagatagaaaaagaaattgattctaaatgatatcagttgactgaaaactctattttaaaagagactttaggaaaattgctgaaagatgaaggttgttcgttatttcctattattaatcaagatatttcaagtcaaaaacaagaaaataaaaacatttttactttagaccttgaaaaggtatttgagtgaaaagaatgtaggattcatccagaattttctatcttttatagaaggccaatagaagaacacaagaaggagaataaatcatgaatcataaatcgttttggaaggttacaattattggcaaatcttggtatagaatttattccaagaaattcttcttttaaaacaaaaaaagaacaaaatagaattgcgattgatcaaaagaaacaaaatcagttagtccaagagtttaaccaggaaaaagtaaatacatattttgaaggattagataattattatatttttgggatagatagatgaatcaaacaattggcaacattatgtgttactgataaagattgagttatacagtcctttgatatttacacaaaattttttgattctaaagaaaaaatttggaaatatacaaaaactagaacggaaggtgttcttgatttgacaaatcttaagatcgaatctgataaaaattgaaatacttatatagttgatatttcgttatttgatgcaaaggatgaagattgaaatcctacaggtacaaataaacaaaatattcaacttaagcaactggcatatatcagaaaattacaatatcaaatgtctgcaaatgaagaatgagttttaacttttttgggaaaatataagaacaaagaggaaagagaacaaaatatgaaaggactaattactccatataaagaatgaaaaaattttgcagatttaccaatggatatttttcaagaaatgtttgaaaattattatagattaaaaactgatcaaaatttgtctgaatctgagaagaaaaatcttatgaagatcactacagagcttgatgcaagtgaaagcttgaaaaaatgagtagtcgcaaatatgataggagtgatttattatttgatgaaaaaatatgaatataaagtgaagatttctcttgaagatctttcaaatgcttggtttttttcaaaagacggactttcttgagatgttgtgctaaatacgaaaaatgatgaaacaatggatttaaagaaacaagataatctagcgcttgcttgagtttgaacatatcatttctttgagatgcaattattgaagaagttatttaaaatttctaccgaagaatgagttttgcatttagtcccaagtttttgaagtgtaaaaaattatatagagattatgaagataaaaggaaaatatgtatacaaacaatttggcattgtttatttcgttgatccaagaaatacaagtagaaaatgtcctgtttgttgaaagtgatgaaaaaaatatatctcaagagttgacaatgttgtaacatgtaagaattgttgatttgatacatcatcagacaattccatccttataaataattatgaaaaacaatgaaaaaaacttcattttataaaaaattgagatgataatggtgcatataatatttgagagaagataagagaacttccaaaaaaatcagatgtaaagaatacctcgatttcatgaaatatttctttttcatag

SEQ ID NO: 234 - DNA, 3630 bp, unknown; identical to SEQ ID NO: 200
  metagenome-derived sequence
  misc_feature (1)..(3630): Unk67 Cms1 native coding sequence; TGA encodes glycine

SEQ ID NO: 235 - DNA, 3807 bp, unknown
  metagenome-derived sequence
  misc_feature (1)..(3807): Unk68 Cms1 native coding sequence; TGA encodes glycine
atgattaatctagaaagttttaaaaacttgtatgaagtgaggaaaacagtcagattttgattaaatcaacctagaaagaaaagtgatattaataaaacgcattgactattaaaagatttggttgagatttcttttgagagcgaaaaaaaactaattaataatgaaaataatcacgtactaattgatacagagaaagttcttatagagaaattacagcaatatgtaaattgactagaaatacaactaaaaaactggaaatgaacatatcaaagatatgatttaatagctataaataaagactactataaaatattggcaagaaaagcaaaatttgatgctatgtgggagattactaaatttgataaaaaatcaaataaatatataaaagttaaacaaccccaagcaagtcaaatttctttatcatcattaaagatttgaaatagaagtgatagtattattcaatattggtgagagataattgagaaaacagattatttacttaatatttttaaacctaaattagaacaatacgagagggctattaatgatgctaatagtgctcatattaaacctgatagtattgactttagaaaaacctttttacaacttttgaaactaactaaggaatttttacaacctttattggatagatcaattattttcgagctttcaaagaagaaagtttctcaagaaattgaaaagatttctgagtttgcttgagaaaaaaataatacaaaaatttataatgtattgaaaaattgagaagaacttagacaatattttgaagcaaattgatctcaagttccatactgaagagtaagcttaaattaccatacagcagtacaaaaaccaaataattttgaacaagaaattaaaaaagctatagaggatttatgaatagttgagttcttgaataaaagtgaacaggaaattacaagctatttacatcaagattcaaaacaaaaaatacaattattacttacttcaaaacatccttatcctattgagttattacagttatttaaagtaaaacctattcctttttcagtaaagtataatttggcaaagttcattgagaaaaattataagaatgaaatcagtttatcttacgaagagattttagataaattgaatttgttatgaagagctattgatatcgcaaatgattttaaaaattccaataatcaaaataacttttctcttgatgaataccctgtcaagttagcctttgattatgcttgggaaaatacagcaagaagtttaaaaagaactatacctttccccaaagaggtatgtaaacaatttttaaaagataattttgatgttgatgtcgataatgcagattttaaattatatgccaatcttttattcatagcggataatctagcaactattgaatacaataatccaaataatgaagcagaacttataaatgagataaaacaagcatttgactctatagacttttcttttgataaagaaagatattgatgatataaaaatgatgttttagtattgctaaataaggcaaaatctcaaagagactattccactatattaaaagcaaaacaagaattgtgattattgagatgatgactgaaaaataagattaaaaaatacagagatttaacacagagattaatagacaaaaaggattcacatttttgaatcgcgagttttgtaggaaaaacacttgctaaaataagagatcgactcaaggaagaaaatgaactcaataaaatttctcattacggagtaattcttgaagataaaaatcaagataaataccttcttatatcacaacttgatggaaaagatacaagagaaaaaatatctcaaaaacttggcaatggagatataaaggtgtatcaagtaaattcttttacttcaaaagcattaaataaatttatcaaaaattcttgatcggaagatgcaaaaaaatttcactgagattttagatataaacataaagaagtttcaatatatgacgaacaaggaaaatggatatgatatcaggaagaatttttaaatcatataaaaaagtgtttaattgattctgatatttcaagagaacaaaattggaaagcctttggttggaatttttcttgttgtaatacttatgaagagatagaaaaagaaattgattctaaatgatatcagttgactgaaaactctattttaaaagagactttaggaaaattggtgaaagatgaaggttgcttgttagttcctattattaaccaagatatttcaagtcaaaaacaagaaaataaaaatatttttactttagattttgaaaaggtatttgagtgaagagaatatagaattcatccagaattttctatcttttatagaaagcccatggaagaacacaagaaggagaatagatcatgaatcataaatcgttttggaagagtacaattattggcaaatcttggtatagaatttcttccaagaaactcttcttttaaaacaaaaaaagaacaaaatagagttgcgattgatcaaaagaaagaaaacaagttagtgcgagagtttaatcaagaaaaagtaaacacatattttgaaggattagataattattatatttttgggatagatagatgaatcaaacaattggcaactttatgtgttactgataaaggttgagttattcaggattttgatatttatacaaagcactttaatagtggaagtaaaagatgggaatacaaatttcatagaaaagattgaatattagatttaactaaccttaagattgagtctgatagaagttgaaataaatatatagtagatatatctttatttcaggctaaagatgaagattgaaatcctacaggtacaaataaacaaaatattcaacttaagcaacttgcatatatcagaaaattacaatatcaaatgtctgcaaatgaagaatgagttttaacttttttgggaaaatataagaacaaagaggaaagggaacaaaatatgaaagaactaattactccatataaagaatgaaaaaattttgcagatttgccaatggatatttttcaagaaatgtttgaaaattattatagattaaaaactgatcaaaatttgtctgaatctgagaagaaaaatcttatgaagattactacagagcttgatgcaagtgaaagtttgaaaaaatgagtagtcgcaaatatgataggagtgatttattgtttgatgaaaaaatatgaatataaagtgaagatttctcttgaagatctttcaaatgcttggtttttttcaaaagactgactttcttgaggtgttgtgctaaatacgaaaaatgatgaaacaatggatttaaaaaaacaagataatttagcacttgcttgagtttgaacctaccatttctttgagatgcaattgttgaagaagttatttaaaatttctaccgaagaatgaattttgcatttagtcccaagttttggaagtgtaaaaaattacacagagatttttaaggataaggggaaatatgtatataaacagtttggagttatttattttgttgatccaagaaatacaagtagaaaatgtcctgtttgttgaaagtgatgaaaaaaatatatctcaagaattgataatgttgtaacatgtaagaattgttgatttgatacatcatcagacaattctattcttataaaaaataataaaaaacagtgaaaaaaacttcattttataaaaaatggagatgataatggtgcatataatatttgagagaagataagagaacttccaaaaaaatcagatgtaaagaatacctcgatttcatgaaatatttctttttcatag

SEQ ID NO: 236 - DNA, 3567 bp, unknown
  metagenome-derived sequence
  misc_feature (1)..(3567): Unk69 Cms1 native coding sequence
atggcttcaatttgcacaggcgagagggaggttataaatatggaacaatacaaaatcactaaagcgattcgattcaaattagaaccaaaacatatctcgaaaatcaagtctgatgtaggtgctattgaactaaaaaataaatttaatctagcgtcattcatatcctctcttggtagttttatcagccaatttaatgaatatattttctatgaaagcaggaataacgaattcatcataaagggtaatctcaccgtcaagaatatctggctaaaacagtacgcaaagcaggagattgtaggattaaaacttaaaagagggcagactattggtgatattaagggcttatcggataaaataagaaaggcaagggatgaagttaatgatatctacttaaaactttgcgatgaaacatcaaaattgaatgaaagagcaaatagggcaaaaaagggactgctgattaagagattgaacgccagaaactcactgccgttattactttctcttatcgagaatacaactgacaaaaatgaaacaggcaatctgagtattcaactaaaacaattaggggcaaaattacaatctcaactggattctggtgtcaatatgtacctgcctgcacaatcaaatgggcttcctatcgcaaaggcaagtttcaattactacactattaataaaaaaccgatagattacgattatggccagaaaaagcaggaacaaatagataagctagaaattaatttagattctaactttgatagcttaattcctcagcatataaatatatccaataacctgaaacaagcaattaaatcagatatttcagatattgcaaaaaaaggaaaagacaatactcttctgcttggggatgctccttttgtaaatcatgattatgtttcgattcggcaaatactaaaaaatataaaagcagagcagaaaaaaatattttctgaatttatcccaagagatgattcgacatttaagaatttgaaaacaaattcaagactctatcttttcaacgatatttcaggagaagaatttaatgactataaacataaaacaagagtgattgaagagaaagcagaaaagaagaaccaatgcaataatgatgaactaaaaagagaattaaacagcgagttgcaaaatctcaaaaaagaacgtggttctttaatcaatgccgcagacagaaatactaaaggaaaattcaaaacatacaaggcgtttgctaacatttacggaaaagtcgcacgagatcatggtagaatattatcaacacttaaaggaatagaaaaagaacaagtagagtcacaacttcttaaatattgggctgttgttatagaagaaaacgggcaacatagtttggcccttatcccaaaaaagaatgcagaagaattcaagaaatggctggaaaataatgcttcgacaagttcggtatctcctattaaaacctactggtttgagtcactgactctgaggagcttgcgaaaactttgttttggatatatcgaaaatcaaacccattcaaatacattctatccagaactaaaaaaatctcctgaactcgaaaactacaaagatgataggggtgatttcattagaggtgagttttttttcgagggggatgaacaaagacttatcaaattctacaaagatgttttaggttcacaacacgctcagaaggttttaagctttccaaaacagcaagtcaaagacgacatcattgataagcagtttaacacattggatgagttccagattgctcttgagaaagtttgctatcgtcgctttgttctttgctcatctgatattaagctcaaactaaaagaatacgaagcagaaatatttgggattacttctctggatttaagaaatgctactaaaacaaacattaaaaatcacacccttatctggagaatgttttggaacaccaaaaatgaaagcaataattttgacatccgccttaatccagaaataacgctaacataccgctcgccaaattctggtaggatagaaaaatatggaaaagattcagaattgtatgatgagcgcaagaataaccgttacctgcacccccaatatacgctggttaccactatttctgaacatagcaatgccccgacaaaaataatgtcgttcatgacagatgatgagtttaaaacatcagttgacgcattcaaccagaaactcaaaaaagaagatgtgaaatttgcactaggtatagataatggtgaggcagaactttccacgcttggtatttatttgccagtatttaataaagattcaaactcagaaatttggaaactattcaaaaacgtaagtgagtatggctttaaatttctgactataaggaatttatcgtattctgagattgatgcaaatgagaggaaacgaaagattatccaaaatccatcatactttcttaataaaaatctgtatatgggaatattcggaagaactgagcaggattacgaccagatgcttgaaaagcaatttgaagaaaaatcattgcttagtttggatttaaccactgcaaaagtgattaacgggcatattattaccaatggtgatgtacctacattcttcaacctttggatgcgacacgctcaacgaaacgtctgggacatgaatgaccattcaaaatacaaaacagcgaagaaaataactataaagaataatgatgagctaacagaagctgagaaagccaagttcgctgaatacatatcagacgggaaaaaatatgaaccattaacagctaaagaaaaaagcaagtacttaaaatggatttttgaaaataggaatctcctacaatttacagatgaagaaaaaaagaaattcgataattgtcaaaggagaaaggacaacttttcaaaaaatattctttttgcggtttgtagcataggcacagatatttactcagttacagacgtttttgacgttcgacatattttcaagaagcgtaaaaacttcgatgtgctaaaatccgaagcggagattataaaagaaatagagtcatataacacaaacaaaagcatccggaaaattagcaacgaagaactagatttaaaaattaatcatttaaaacaatctgttgttgccaatgctgtcggtgtaatacattttctctataattattataaagaaaaaacaggtggtgaggggctaattgtaaaagaagggtttgacactaaaacggttgcagatggattagaaaaattcagtggcaatatttatcggattttagaaagaaaactttaccagaaattccaaaactatggattagtaccgccaattaagagtttgatggcagtgagagggggtggaataaaagataatggactatccaaaactatcagacttggcaatgtttgttttgtgagccaatcgaaaacaagcggaatctgcccgctttgtaattccaaaaaactagaccataacacaacttgtccggattgtcagtctgatttgattgaaattttccactcaaacaatggcgttgcaggttatactattgcaaagaggggatttgagaattttaataataactctaacaaaggtgtctctgaaaaatga

SEQ ID NO: 237 - DNA, 3390 bp, unknown
  metagenome-derived sequence
  misc_feature (1)..(3390): Unk70 Cms1 native coding sequence; TGA encodes glycine
atgatggaaaaattaacaaatttatatgaggttattaaaaccattaaatttgaactcaaacctagtgaatttactttaaaaagatgtagttttgatagtagttttgaatcagatcctcatgttctatttgaaaaattgaaaccaatacacaaacaacaaaaagagatattaaacatattatcaaatcttcctccacaaaaaatagtaatacataaaaatttaataaagttaatagactcagattatttttacagattaaaatctaaagcccttagtgcaaataacacattagtagttcttagtaaagaatttcaagaagaattttcaaattatatcaaagaaaaatttgatagattacattcaaccaactatagtctttcttacttactttgggcagatagcttagaaaaaccaagcaatacagacaaaaaacccacaaaatcagaaatagcttttgctgtcaaaaggtatgttcatgctgtccaaaaagtagaagaaattatttctaatataatttataaaacctgaaatacagataatgagttaaagacaatgttaaaatcatattatgataataaagatttatgatatatttttagcatcgcaaatagatatttacaatcatatagtccaacaagttgattccaggtttcaaaatttggttttaatgcaaaagcaattagaaaaaaagtagatgtagaaaaaatggaaaaagaaattagaatactagaaacaaaaatgcttgatttagaagacaaaaaagtaatagctacacagatttttgatgattataccaaaaaatttgtacaagaaaaaataaaaactgatcctaaattagtagcacttagagagaatcaaacagctagtcctaatgaaagaaaacaagcaaaagaatatttgaaaacattaaaggaatgagattttaattatcaaaaaattctaaaagaaagatcaaaagcaaaaaaagaacaaaaaaagtacgaacctaaatttacttgagataaagaatattgtgaacttaaactagcaaaaattgatgctagtgtcatatatggtagagcaaaatgagatttttttgcaaagcagcaagaactttattctcaacaagcattatcacattacgcaagacttgttagaaactgagaaaaatattttgtggtaatgatagatagggataatattaatgaattagataatttatgagacaatcagataaaaaacgatgattattttgagattttgagatactcttcactaacagctaaggcagtagagaaacttatttttgaaaaaaatgctctaaattttaatcgatatgataaagaatatagggattgtaaaaatatccgagaaaaaagaacttataaagagaaaggaagtgaagattctcgttcgataaccaatgatcaaaaaacaaaacttagaaagctagtttcttttttgaatgaagcaataactcaacttaataaaaaagttgaatgatgagtttttaattgggtaccatttaatatatccaatgagtttgacgactttgctgagtttagaaaatatgttactaaaacctgttatataacaaaatgggaaagtattagtaagcaaataatttatgatcttgataaaaaatgaattttagacttttatcagatttacaacaaggattttgctgtagatccatattttgctaaaacagaaagagataaaaatcgtattaaaaaagatataagtataatgggaaaacaaaatctttttacaatatactgggaatctttatttggagataattctagtaatattagattaaatccagaatcaaatctttatgttcgtcctgctaaagttgttgaagaaatttctgatcataatcccaattacgaaacaagtaaattgagatataaagaaaacaaaataatctgagattttcaacttgtattttatccaaccaaagagcttcctcttgataaattgcaaaagaaaatcttggatgaggtagataaatcatatgcaataggtattgatctttgagaaaatagcttagctaccatttgtcttattgataatgaaaaaagagttgttttggatgaagaaggtaagccgattatcaaagacctttctatgataaataacaaatgagactttgtggaattagatgattgttatattgattgacaaccttataaaagaaaacaaaaattattagtttgaggacaaggaaataaaccatacactttagggcgatacttccctgaaaaattccaaaaccaagttatctcaaaaatgtcaaaagaaacattaattgaagtgctaaaaatactggaagatatagcaccagaaaagctttgaatcgttgataatcattgaaacaaagtatttgattacaattatgcatttgaacacttaaaagcaactaataaaattagatatcatttacaagcatttgatcacactaatgaagagatggagattctagagaaagatttattggcaagtactaaaatcagaggatgatttgtttgaaaagtagtttcttatattactcaaatgtcaaaaaaatataatgctcttattgtatttgaaaatttagatcaagaaattggtcgtattagatgaatgacattattttcagaacaggaatatgaaaaagtatccgcaaaagaagaaagaatgtataaaggtatttcaccatatcaattgatacaagacaaaattatacaaaagtgtaattatcttttatctaaacaagataacacaaagtgaattcaaatttcacctagattaaaaagacaagaagatattaagcaactaactttattaaaagataaaaattgcgcatggtgaaaggttgtttttgttaatgaagaaaattcttctaaagaatgtcctgaatgttgatttatcccatgaaaatattcaagtaacataaatattcaagagaactgaattgaaattatggcaaacaaaaaagataaaaaacttttattatttgaaaacaatcctctgctaaatgaaagacgaattgcgtatcagagtataccagatacaaacgaattaaaaaagaaatctctgttgatagaaactagggttggaaagacaattttaactgaaacagatatgaaaattgtttgagatccaatgatttgtgtaaattgtggatatgacactagaaaagaagagtgggtcaaaaaatataacttaaaaagttgtgatgaaattgcagcatatattattgcaaaaaggtgattagaatttgttgaaaacaagtgatatgaaaaccaatcaatcgacaagcccagtcaaactaacacatttgaagagaataaaaaatcaaaaaactctgataatgaaaattcctcatatacaatgtctggtaatattaatttttcacactcttaa

SEQ ID NO: 238 - DNA, 3408 bp, unknown
  metagenome-derived sequence
  misc_feature (1)..(3408): Unk71 Cms1 native coding sequence; TGA encodes glycine
atgctttcaaaaaaaaacaaaaaatgaattaaacaacctcaagcaaatcaaatctctttatcatctttacatgataaaaaggatttaataataaattattgggagaataatatttcggaaagcgattttttaataaacatctttgaaccaaatttaaaaaaatatttagatgcacttgctaatcctgataaatattcacatacaaagcctgatttgatagactttagaaaaacatttctacaattattaaacgtaaacaaagaatatttgcaaccattatttgataaatctatcatatttgaaactggaaaaaagggagagtctaaatatataaatgagattaatgagtttgcttgaaatgaaaacaatttaaaaattaaagaattactagatttatgagaaaaaattagacaatattttgaatctaactgactacaagttccttattgaagagttagtttgaactattatacagcggtgcagaagccaaacaactttgatgatgaaataaaaaaatgaataaaagacctatgaattatagaatttttaagaaaagaggaaagtgaaatacaagtttatttaaatcaagaatcaaaagaaaaaataaaattattaaaagattccaaagaaccttattctattgagttaatacaactttttaaaccgaaagccattcctttttcagtaaaatacaatttagcaaaatatatagaaaaaaattacaaaaaggagcttggtttaaagtatgaagatattttgtataagtttgacttactttgaagatcttatgatatttgaaaagattattctgaatgcacagaaaagaacacattttcacttatgaaatatccaattaagttagcttttgattattcttgggaaaatttagcaagaagcttaaaaagggacatagattttccaaaagaaatttgcaaaaactttttaaaagataattttgatgtagatataaacaattctagttttaaattgtatgcggatttattatttattgctgaaaatttagcaaccatagaatacaataatccaagtaatgaaaaagagattatcgataacatcataaacacctttcaaatcataaattttgaaataaatggatataaaaagaaagactatgaaaatcataaaaccgcaattttgtctttattggaacaaggaaagaatgaaagagactttaagagcaatgtttttatcgaagcaaaacagaaactatgactcttgagatgatgacaaaaaaatctaattgcaaaatataaagaactaactgaaaaactagttgataaaaaggatattcacatctgaatagcaagttttatatgaagaaatttggcgaatataagagatggattaaaagaggaacatgaactaaataaaataactgactattgaataattgttgaggacaacaataatgacaaataccttttacttttaagacttgcttgaaaagataatagagagcaacttaaaagtaaattatgagatggcgagataaaagtgtatgagattaattcttttacttccaaggcattaaataaattcatcaaaaacccttgatgagaagatgcaaaaaaatttcattgaaattttaattataaatatagagatatttcaacttattctcatgaatgaaaatggattggttataaaccggattttattaaacatattaaagattcgctttgtaattctgaaatagcaaaagaacagaaacgggttgagtttggatgggattttgataagtgtaatacctatgaggaaattataaaagaaatagattcaaaatgatataatttaataaacaacactatctcaaaaaagaatctcgaatatttaattgaaaatgataattgtctattactccctcttataaatcaagatatttctagtaaaaaaacaataaataaaaacgcttttaccattgattttgaaagagccatagattgaaagtcatgatatagaattcaccctgaatttagtgtcttttatagaacacctatgcaagaatattcaaaagaaaataagttttgaattgttaatcgttttggaagattggaattgttggcaaatattggaatagaatatgtgccttcaaacaaaaattatactactaaaaaagaacagaataaaatctcattagataaagataaacaaaataatttaataaaagaattcaacgaagaaaaggtagataactattttgatagtttggataatttctatgtttttggaatagatagatgaatcaaacagttagctacactctgtgtaatggataaagcttgagttattcaggatttcgatatttatacaaaacatttcaataatactcagaaaaaatgggaatataaaaaaaatagaactgaatgaattttgaacttaacaaatttaaaagttgaatcagatcaaaactgaaccccatttctagtagatatttcattatttgaatcaaaaaatgaaaattgaaaaagttttggaactaataaacaaaatgagaaattaaaacagttggcttatgtaagaaaactacagtatcaaatgtcatttaataatgaatcagtattaaattttataaaaaaacatacgactcaagaggcaagggctgagaatatatgagaactgataactccatataaagaatgaaaacaatttgccgatttacctatagatacttttgaagaaatgtttgaaaattttcatcagctaaagacaaatgaaaacttatctgagttagaaaaacaaaatttaatgaagcttactactgaacttgatgcaagtgaagaattaaaaagaggagttgttgccaatatgattggggttatttgttatttaatgaaaaaatatcattataaagtaaagattgttcttgaaaacttatctaatgcttggtatttttctgaagattgattaacatgagatgctttgctaaattcaaaaaatgattgaataactgattttaaaaaacaagaaaatcttgcgcttgcttgagtatgaacttatcatttttttgaaacacaacttttgaaaaaaatatttaaaatatctattgaagaaaaaatccttcatttagttcccagtttttgaagtgtaaaaaattatacctatctaataaaaaataataaatcacaatatgtatttcgacaatttggtattgtttattttgtaagtccaaagaacactagcttcaaatgtcctatttgtctaaaatcaggaagagaatacataacaaggaacgataatataataacttgtaagagttgtggttttgtttcatgaaaagacaatgatgaaatattaaaaaaatataccaaaactcatctcaacatacattttatcaaaaattgagatgataatggggcgtatcatatatgaaaaaaactgctgaaatag

SEQ ID NO: 239 - DNA, 3000 bp, unknown
  metagenome-derived sequence
  misc_feature (1)..(3000): Unk72 Cms1 native coding sequence
atggtacctcaatatgaattcacaaaaacaataagatttactcttaacggtgaaaacactacttttttacttgataaagatataaattggcaaaaaacattgaatttcaatgattttcagataagttttaacgacctattgaatcaatttaaaaaaactgttttttatataaataacaatggtaaattggtggtaaaaaatagtttagaaattaaaaaatcatggttaagacaatatgcgcgtgatgaattttataagtttaacgaaaatcaacgaaaatataataaatttccagcaaaattatttcaacccattttcaatgattggtttaaaagaaataaatcattgttaaggcaattcgaaaagattaatcagatgccgcaagaaagccaaataaaaagatcagaaattttaacattattgcaggaaattaaaattgctgataattttctttttatcaaaaattttgtccagccgggaatagtaaatgataaaaaatccgattataatttagaagatttaaaagaaaaggtaaatcgatttgaggaattattaaataaagctatttttgctatggcaccggatttaagtcagggggcagaagtgtgccgagcgagtttaagctattatacagtaaacaaaatttctaaacgagattttgacaaagaattagaatacaaaaaacaagaattaaaaaagccatataataaagaattgaatcaacggcttttaaaaatggttggatttttagattatttaaaaagtgaatatcaaagtgatattcaaaatatttcaattcagaacttatatgaagcacttaaacaatttaaatcacagagaaaatcagagtttatgcaagctgtgcagcagggaaagcaagtaaaagagctgattaaagatttcccactgtttaatgcgcagaaagattcaatgcaaaaatttatttatgcttcaaaagataaacgaggaatatattttcaaaatcagtggggatttcctaattatgttaatttttgcaataacgtttttaaaccagtagcaataaaaatcggtaatttaaaagcacaaattagggctattgaacaagaaaaaatagaagctcgcttgctccaatattgggcgcatattcttaaaaaagataacaagtattatttattattgatacctaaagagaaaatgcaagaagtaaaaaaatttttgaatagtttaaacttcaaaaaagaaagagaatatacgctttatagttttaattcattaactttaagggcattaaaaaaacttattcgtaaaaatctcggtaaagagcaaatacgtcttcaaaatgataatactgcgatagcgttgtataaagaagtttttcaagataaacatcctaaattacagaatcttgattttagcggatttgaaaaagatatcaaaaaaatcatccaagaaaattataatagcgaagaagatttccgtttagagcttgaacgtgtagcttattgttgttttgagaaaaaaatgaaccaaaaagatatagatttaatgagaaataaatttagtgcgcttttattagaaatctccgcttacgattttgaaaggaatattatgggtgaaatgaaagaacattccaaaatttggcaaaaattttggaccgtggaaaataaaaataaaaattttcccgtgcggcttaatcctgaaattcgtattttttatcgcccgcaaagacagcaaggggaccccaaaaagcaaaaaaaccgttttgcaaaggatcattttggtgtagcatttacaataacccagaatgccgctcaaaaaaaattagatttagcgtttaccaaagaaaaagaaatatctgaagctgtcaaaaaatttaataaagaagttatcggcgaatttattaaagaaagagatgataatttatattattacggcattgatagaggccaacaggaattagcaactttatgcgtgatgcgattttctaaagagcaaggagaaataaagcttgccaatggcgaggtaaaaaaatttgatattcctattcctacaccaataaaattatatcgtattaaagaaaatcatttaaatggcacaaaggaaattattactgatcaaaacggcaaaaagaaaatagttagaatacttgaaaatccatcttattttattgacgaggaagaaaaatttgaagaaatcaaatctacttgttttgatttaaccacggcaaarcttattaaarayaaaatagttttraatggygatgtrcggacttatattgaacttaaaaaaactaatgggaagcggcaactttttgaaaaattgtcaaaaattgacgataatgcgaaaattgaattttgcgaggacgaaaatggaagaagatttcagataaagtcaaaatcaaccgaaagaaataaatatcaatatatcgttttttattcaccccaagatgaaaaaataatgtcgcgggaggcaatgcaaagagatttgcaagaatatcttgattatttgcgcactaacaatttagccaaagaagatattagtatagaaaagattaaccatttaagagatgcaattactgctaatatggtggggattattgcgtttttatttaaacaatatccgggaattattaaccttgaaaatttaactgaaacacattttgaaaaaaataatgaaaatatagagcgtcgtttagagtggagtttatataaaaaatttcaaaaatttagattagtgcttcctaaattacgtcaaacagtaattttacgtaaagaggacaaccaattaaatcagataggaattattcattttgtttcgccccaaaataccagctcctcttgtcctgtttgtggcaatgttgtaccaatggggaaaagagaaaaagataaatttaaatatcatatttttatttgcgataaatgtggttttaacacccaaaacccaaaatcaccttttgattttattaaaaattcagatgaggtggcggcatataatattgctaaaatccaacttaaataa

SEQ ID NO: 240 - DNA, 3378 bp, unknown
  metagenome-derived sequence
  misc_feature (1)..(3378): Unk73 Cms1 native coding sequence
atgaatgatgattttaaaaatttgtatgaggttcagaaaactattacttttgaactaaaaagcaaatatatagattatttttataaaaatggtcagtgtgtagaaaacaaaaattgtttcatcaattttgaaaaaacttcaaagttcatggaaaaaaattatttttccacttctcaaaataaaggaaattttgattgtgttttaaaatttcttgaaactactgataagatcgttaggtttgcagataattttgccactaattttagtaatgggaatattttagcaagaggatttgaagttaaaaaaaaattactagagaaatatgacagaatttctttttttgagttaaagaaaagaaagcaaataacagtaaaaagaaaaaacgtaaatacaggcaaaacatatgatcattttttgtattttagcgatagaatgaatttagaaaatttgtttgaaatgacaaatgatcaacatggaataaatttttgtcagtatttggaaaaaattttgaatagaataaagctctatcgagctaaaatggaaaataatttgactgtaaataatgataatgagttcacttttaataaaaacaaagttgttttttgctcagacgcaaaaatatattttgaggagtttaaaacgttacttgatatattttctcttattgaaagagataaaaaggtaggaatatacactatagataatgaagtaaatgaaacaaataaaataatagaagtatttgaatttattaataataaatattcaatcactctaaaaagcaacttaggatcaattatagaagttgtaaacaaagaggcaaaaaaaccgattatcctgacgtctttaaatccaagggtggtaaataaagattcaaagaaaacagaaagtgaatttcaaaatattcaagaatttgaaaaggaaattgaaatagaagaaatggaaatggatgcaatcaatattaaaaagtttgaatatgttgaattgctggaaaaaaaattgaaaaatagtctagacgagttgaaagttttaaaaacagatattcaatctctgattaataaaaaaaggagaaatgaaaaattgttaagcaatgaaattgcattatggaaagagtttcaatttgcgaaaactattttaaaatatatcaagttaaacggagtagttatttctaataaaaaaaatggtagaggtgaatatcaagatgttttcaattatagaaaatctggtgaaagattaaacaacccaaaaaatttattaggaataggacaacatccattatttcatctttttaaagaagagtatgataattataaaaatctttgtggtgaaaaatttaggaaagccaaatcgttgggggataaaaaatcgctttataacgcagtaagtcgtgaagtcctaagacaaaaagaaatgcagtatctaagttttttagcaaaagatagctatttttattatttagttctgattgataaagattttaacaaggatagaaaagttattgaccagattgggggttgcactggaaattggcaaatgctggattattatcaattaacttttaaagctctagaaaaattggcgttgttaggagaatcaacctttgatattaacaatcaagatataactaaagaagtaaaattaatttggcaaaattataaagagaaaaaatttaaggaatataggttatgcagagaagaaaaacaaggattgaatcggtttgagatagacaataaaaaagagtctttgcaaaaaaatgaattaaacaaactaattgactttattaaaaaagtaattaataaattgcctgattcaaaaaaatataattttcaatttaagtcgaccgaacagtataaaaatttggatgagtttaaaaaagaaatagatgaacagggatattttagtgaatggattagtattgataaagaaaaacttcttcaattggaaaaagaaacccagaaggaagtgttgatctttaagctacacaacaaagattttcgtaaagtggctatagatgaaaagagaaaacaaaatctttttacagaatattggctagacgctatgaggttagaaaaagaagttcgtataactcctgaaatagatatatttaaaaagaacaaagaagaaggcaatgtaccagaaaaaagagttttggaaacttctcaaaaagaagtaataagtagtgctagaatttatcaaaataaattatatggagcttttcgtttaaaattttatcctaatagaagctgttcttttgagaaagtaaatgaaaaaattaaatttaaagataatgtgtgttttcttggtatggatagaggcgaaaaatccttaatttcttggtgtttgatagataacactggaaagcttataaaaaatggggattggactaaatttgatgatgaaaaaaattctgataaaaaagcaaactacgctgagaaattaaaaatttacaaggagatcaaggaatgtattttgcaggattatgagagaattgcagaatgtattggctctgaagagaaacagaaattaatagacgaagtaaaaaagaaagaaaaagagctagaagcaaaaagtttattggcgactgagacaatcaaacagggttactgtggacatttaattaaagagataaataaagtattgcttgattatccgaatacatacattgttttagaagatcttgatatacaaggaaaatctgaaagtagggaatctgatattacaaataaaatggataatttagcaaaaacaatgggagcaactatttatcagacaatagaaaatgctttggtaaataagtttaagtattattccgtaaaaacagatttggaaaaatacgatgggcagcagttagttcccaatattgttaaagtagaagatttgagaatttgtgacaaagaaaatagagaatatggcaaacagaaatttattaagtcaaaagataaaataggaaatatattgtttatagatgaatatctaacttccaatgaatgtccaaattgcggatttaaccatgaaaagattaaaaatttgaattttaattttcaagaaagtgatcaaaattatattttagagaataatggagaaaaatatcttttctcaaaagattggtttaaggaggaaagagttaaaaatgttttgtatgataaaaaaattaagcaaatattttttccaagagcagttaaaaatccttttattaaaagctcaaaatccaaaaaagattttttttattgttctaaatgccaattttcgtcggagaataatttagtgaatctcggtttgataaacggcaattatcaaataaagactggagatgacttagcggcatatattattgccaagcgaggtcttactcttattctgaacaaaaaaaaggaaatttga

SEQ ID NO: 241 - DNA, 3297 bp, unknown
  metagenome-derived sequence
  misc_feature (1)..(3297): Unk74 Cms1 native coding sequence
atggaaaagtttaaaatcacaaaaacaattcgctttaaagcaataccacaaaaagcagaaagactacaggctcaagcagaggcattaatggataatcctaaagcggacattactgtgcttgtcattaagggttttgatttaattaatttatttgaggaattagtctataccaatgataaaaaagagtatttaagaaaaaatattactatccattttagatggttacgacaatatgtaaaaaatgaatggtacgattggaaacaagggaaaattgaaatagaaaatgataataacaaagcaaagcaaaagcaaccccaaaaatccaattcaccctttgctagcttattagccataagagataattttgatgatgctaaagaaaaagaacaaacagaccatactaacaaaacggcaaaaaacagtgaggataaaaaattaccattaggctctgtgccttttctaaaaaatgaacttcaaaatattagtagtagttggcgggagctattagatgaattaagaaaagcttttgaacgacctgaggaaaaccgtatgcgcagagctgatattgctaaatttttaggagggctttccacgagacaaatgctccctgcattaatcgaattcattaatgatttaaacgataaaaaatcagaagaacaaattaatgctttaaaaaaattagtacaagagtttaaagaactacttgaaacttgtcaaaatgcttatttatctgcacaaagttccggcataaatatagcaagggcaagctttaactattatacattaaataagaaagagaaaaattatacagaagaaaggcaaaaaatattaaacagcttgtcaaggtcattttttgaaaaaggaagagtaccccaaattattaaggatttaagcattgacgaaaccctttcaattggaaacctatatgagtttctaaaaaaatataaagcagagcaaaaacaacaatttcaagaagcagtaagccaaggtttaaagtttaatgaactgaaagaaaaatttccattatttgatacaattgaacctatctataaagactttgttgcaaaaaccaatgcaattactcaaaaaagtactgctttacaaaacagctctcaaaccaaagatcttaaagatgaaatcaataaactcaaaagagaacgggggcagatgtttcagaaaggaaaattcaggaaatataccgagttatgtgatgtttataaaaaagttgctcaaaataaaggaaaactaaaagcagctctgataggtatcgaaaaagaaaaattagattcccaaaaattgcaatactgggctttgattggaaggcaaaacaatcaatacaaactctatcttatccccaaagaaaaagtgcaggaagcctatgctgaaatatccaggcaaggcagaatagaaaacgaggtaagtacaccgctgtattattttgaatcgtttacttttagggctttaagaaaattatgttttggggtaaatggaaatacttttattcctgaaatcaaaaaggcatttcctgaattcaacacacctgactttggtgagcatactttcagaacgggaaatattgaacaagatgagcaaaacttaattcaattctatcaaaaagtgttagatactgattttgttcttagaaatttaaggttgcctcattctcaattgcaagaagtaatagatactaaatacaacagtcttcaagaatttaagattgccatagaaaaagtatgttacgccaaacaaacagtcttaaattcaagagtattaaggctattggaaaccgattttaaagcacaaattgttgagctaagcagtttagatttaaataaagaaaatcctacccatttaaaagcacatacccttttgtggaatagcttttggagtaaagaaaatgaagccaatcattttaccactagaataaatcctgagatcagcatctattggcgtgaagctaaagcctctcgaatagaaaagtatggaaaaggaacgccgctttatgatgagagaaagaaaaacaggtatttgcatcctcaatttacagtcgcatttactttcaatgaaaatgcacttagcaatgagttgaattttgcttttgagggttttgagaaaaagaaagaagctctaaacaatttcaaccagcaaataaaccaagagtttaaaaagggattagaaaatcaaattttaggtgcttttggtattgataccggagaagcagaattggcaaccattggattaacagataatggaaaaccttttcctacaaagcttattcggctaaaaacagaaaaattaaattttgaaaaacaaggcttttttaaagacggcacacccagagaaaaaccctatcgtgctattgacaatatgagttatttcttaaatcaagaattgtacgaaaaaacttttagagattatctttttcaagaaacttatacggaaatttttgaagaatttgaaaccactactattgacttaacttgtgccaaagtgatttgcggacatattgttttgaatggtgatttgcatatgcgtaccaagctcaatttattgaatgcaaaaaggcaaatacgacaagcacaaattcttaacccatctttagaaataaaatttgaagaagataaaatcttgatgcctgaaactgatgaagataaaaaagccatcacatcttggaaagccatctatcataccaatgaagagttggagcaaatacaacctataaaaacagtaaatgaaatgctactatcttatttaaaagagattaaagtagatgaatctattgaaatagaaagcatcaaccgataccgcaaagtagtggcgggaaatatggttggggttatagctcatttgtacaataaatatcctatccttattgctattgaaaatcttgcccaaggcactattgaaaaacatcgtttgcgttatcaaggtgtaatggacagacctttggagacagcactgtatcgtaaattccaatcgaaaggattaacgcctcctatatctgatgttgttgcaattagagaagcccttaccgaaaagaaaaataataaaaaaagtcagttgggtgtattacaatttgtagatgagcaactcaccagtaaaacctgccccaattgtggcaagaatgcctatgaaggtagtagaaaagaattgtacttaaaggagaagaaacaaggaattttttcttgtacttgtggctatcacaacatcaataatcctatgggcttgaacttacacagtaatgatgctgttgccgcatttaacattgccaaaagaggcattaaaaacattaaataa

SEQ ID NO: 242 - DNA, 3528 bp, unknown
  metagenome-derived sequence
  misc_feature (1)..(3528): Unk75 Cms1 native coding sequence; TGA encodes glycine
atgcaaaaatatgaagtaaaaaagactgttaggtttgagttgttaccaaaagaaaatacatcaaaaccagaaatcaataatcaagattatgaaaaaaatttaaatgaatttataaaatcgtatgaagaggctttacataaattgcaaaaaatattgtttaaagatgacacacttaatgaaaatttaaaaataaaattatcttttcttgctaattatacaaaatatgaattttacaagtatgatattgttttactgaaaaaatgaacaaataacaaagtatctctaagctctgaaaaactaaaatatttgtataatctacttaaatccaaaatagaagaaaatctaaacttacttaagaaacttaaggaattactaggcttaccattggaaaatcaatctagaaaaagtgaattaaatttttatttttcaaaacttactacaagagataattttgaattttttcaccaattagctaaaaatctatcttctgaaaagccacattttgcaaatgaaattgaaaaaattatttcaaaatttgaaaatattgaaaacaataatcttatggaaaaactaagcttagttttaaaatctacttgaacattttgagttgagatactaagagctagcttaaattactatacagtaaataaaaagccaaaagattatgataaaaaaattttagaaaaaaaagaagaatttaataagcttataggaaattttaaaaacaaaaatggtaaaaatatttttgacaataacatagctcaaaatagttgatttaatagttttttggaagattttgatgatagttatttttgaggaatcaaagattatcaatgaaataccaagaaagaaaaaaagtattattatctttctatccaaaatgcttatgatttgatgaaacaatacaaagcagaacaaaaacaagcttttatacaatttttggctcaatgaaaaaattttgaagatttacaaaatgaatttgaataccatattacaaaagaaaagacaaaaaatgttaaattaaaattgttttatggtataaaagaagaagatttcaatacaatgaaagaacttactaaacaaattgcagctcttgtaaaatttaaaaatcaattaaaacaaaaattagatgatgaaaagaaacaaaatttagaagctgaaatagacagttacaataaaacttatggaaccaattatgatttgtcagatgaaaatttgctagaaacaatttgaaaagatttggaaaaaatagccaaggaaagaggtaaattttttcaagaaaaattatcaaaatataaaaattttgctgaagaatacaaaaaagtagctcaaactctttgaagaataaaagcaaatattgtttctttggaaaaagaaaaaatagatgctaaaaaacttacacattgggctttgatattggaaaaagataatcctttacaagaaacttgtagaactgactctaagtataaagactgtaaactacgttatttattgtttattccaagggaaaaaattagatgagctagaaaatttatggataaactaaatccaaatccaaattgaaaatggactttgtataaatttgaatctttgactttaaaagccttaaaaaaactttgttttggtaaagaaaataatactttcagatgatgaatttatgaagaagctaaaaattacccagaacttttaaatgaaaaatgaaaattaaaagaactttatgaaataaagtctgatgaagaactaataaaattttatcaaaaggttttagatttagagtctactaaaagacaaataaaacttgaatattttgatgaaaatgaatttaacgaagaagttgtaaatgcagatattaaaactttgaaagaactagaagaaaagcttaaaaaaacagcttacattaaaaaacctataaaaattacagaaaatgtaaaaaataatttaattaaatacaacaactgacaatttttcaaagttacaagctatgatttacaaaaatatgaccctgaatttatcgaacagttagaatacaaagaccattttgatagaaaccatccagaatcttttacacaattatggtgggatttttggactgaagaaaatgaaaaaaattgataccctgtaagaatcaatccagagctaaaagttagttttattccaaagcaaaactgatttgataaatcaaggtatggaagagatagatttattgttgcttttaatatgtctataaatgctttagcttgagaactaaatttgtcattcaaagataaagatgaattaaaaaacttttttgaaaattttaaccaggaaatcaatacagagtttaaagataaaccttatttttattgatttgataaatgagaaaacgaaatcattacaatgggattatttaaacttgatgaaaatcaaaatgagcaaaaatgagtaaaaatcacagtatatgaacttaaaccggaatattttgaaaaagaaattgactgaaaagttgtttataaaaatttatcatattttcagtatgatggttatccacaattttacaaagaaaaagaagtttcttgcttaaacttatctatggcaaaactaattaactgaaaaatttatttaaatggtgatatggctactttcttaaaacttaaaaaaatagcaggaaaaagaaaaatctttgaaatagttgcaaacaaacaagctaaaagcaagcaaataatagaaaaagactgaaaattgtatattgattgaaatgaaggtaaaagagaaagtttatacttatttgatgagaaattatgaaatttggaaaataaggaaaaaatcaagcaagaattacaacaatatttggataagatttataatgatttaagcaaagaggaagtgagtatagaagaagtaaacaatttaagatgagctattgcttcaaatatggtttgaatagtaaatcatttattcaaaaaatatcctggctattttgtgtttgaagataaaactattgaagataacaaaaatcgttttgaaaaatacaatattacaatttgaactatttttgaaagaaaactattacaaaaatttacttataatggaaccgtgccaccaaattataaattattttttaccttaaaagatgaagaaaacctaaatcaaatttgaaattttatttacattccagaaacaaatacttcaaatgcctgccctgtttgtagtatatgaaactttttgaagaaaactagaaatggaaaaatagaagttgataatgaaaaaatttataaattatttggtcactgatattgaccagaatttgaaaatagtatgcatcatttatcaaatgaagaatacgaaaaacttaaaaatgaatgaatactaaaaggagatgacttaaagaaaaataaatatcaaccttgagaaataaactgaaaagaatgtgattatcatatgggtaaaaataactattgatttaactatttacactcttgagacgacctagccacatacaatatagctagatttggatttgactatttaaaaaatatccttaaaatctaa

SEQ ID NO: 243 - DNA, 3585 bp, unknown
  metagenome-derived sequence
  misc_feature (1)..(3585): Unk76 Cms1 native coding sequence; TGA encodes glycine
atggaaagttttaaaaatatttatgaggtgaggaaaagtattaggtttgagttgaagccttataatgttacaagagaaattttaaaaggtgataatgattattgaaatttagattcaaaaattaaacatataaaaaaatgagaatttgaagaaaattttaattggaatagattttgtctaaatggatatagtaattttttagaaaaatctaaatcttttttaacttttttagaagaagtaaatttagaaataaaaaaagaaaattggattaaatgaaaaaaagatatatattttgattttaaaagactaaaatgagtttttaaaaatattccttctctgaaaaaaatagaaaaatttgataacaattttaaagataaattatatgaaattgaaaaggaatataaaattctttttcatatatttcaaaagttagaaaataaagaaaaatgagaagctaatgaaaaaaaatcagaaatttcaaaatatttaagaaaaatatcatatttaaatagaaactttttaactatttttaagttttttgatgaatataaaacagataaatatttatttgataattataaaaaattattagatgaaacttttgaaaaaataaataattcaattatagcaagtaatgaaaatgaaaaaacaggttcttgtttttgaaagtttacttttaataaatattcactttttagaagagaaactgaaaatttaaaagataagtattataaaaataaaaaattattagaagaaaatgtaaaaaatatagtagaaactaaaaaaataaaagatgatagagaaaaaattatagaaataaaattagaaactattctagacttaaaacttgaaaaagaaaatgaaaaaattcaagaaagattagaaaaatttaattttgaaagaaatttagatgaagttatttctgaattagattatattaattgaaatatattaaataattacattcaaaattttattaaggattataaagaaaataaacaaacattaatttttaaaaatgaatcatctaataaatataataaatgaaaaattattttaaataataatgaatataatatttctgcattaagatgacaaacattagaatgatgagaatatttaactttattaaaaaaagactataaagatttaaataaagatgaaaaagaagaaaaaaggctagttgataagtttttaaatattattttaaaaaataaaaatataaataaagattttgatacaataaaaaattttagagataaattagctaaatatagatgaaagttaagacaaaatttttcagctagtgaaagagaattcataaatgaagcaatgattaaatattatgctaaaattttagaaaaagattgaaattattttttagctttaactgataaaaataatattttagataaaaatataaataatataaaaatagataaaaatataaaatgaaatattttttcaaatacttttaatatttataattattctcatctacatttttgagcattagaaaaattatgtttgatgtgagattgagatttaataaaaaatgattgactaattaaacagtggaataaatataaaaatcaaaaaaataatataaattgaagatgtgctatacatcaaagatattttgataaaaaatgtgaaaattgtaaaaatgataaagaaaaaaaagaaaaagagtttttttctagttttcaaagtcatataattaaaagtttatataaattaaaagagaataattgagaggattggactcaatatattacagaaattgaaaaattagaaactattgaagagatagtaaaatttattaattcaaatttttataaattagaaaaaaaagaaattaaaacagaggaaatttttgaattagcagaagaaaatgaagttgaattatttcaaatttatagtaaggattttaatatttttaatgaaaagtttttatcttgagaagaaaatttaagaattttaaaaagttgagagtgatatagagaagataagaaagaacattgagaagaaacaaaattaatatcaaacactaaaagaaaaaaagataaaaagaaaaatttatttactatttattttgaagaagtatttaaaaatagagatacttttttatgacaagaatgatgagtattttttagaaatgcaaatttagaatcagataaaaaaagatttagaaataataaattttttgttagttttgatattaaatttaataaatgaacacaaaatgataatataaaattatgtgaaaaaaaagaaaaaattttagaagaacatataaaaaatataaattatattacaataagtaaattaaaaaatattaaagatgaaaataaaatttttatttgattagatagatgagaaaaagagcatataagttatggaatatatgattgaaaattaaaatttcaatgaaaaatatgacatacaaattatgtaaagaaaatatgaaaagaacaagaaaagtttcaaattttagagcaaaaagattatgaaaatattactttaaaaataggtaataaaataattaaaattgaaaaacctatttataaacaattgactacaactcataagtattttgatgaaaattgaaaagaagaaataaatcttttagaattaaattgattacaagaatatcatattttatatatatttaaacaatgagaaaattgagaatattttgtagatttggaaaattgatgaaaatttattttaaattctaaaaaatattgattcactatcttagatagaaattgagaagagattaaaataatagattgaaatgattgaaaagaaataattgattattacttattatttgaatcagaaaaatttaaaaggattctagagataaatgatgaaataaaatattctgaaaatatgtttaatttgaaaaaatgatatatttctataattaaagatttttttgataaaattatttttgattataaaaaagaatgaaaagaagtaatttttatttttgaaaatcaaacatcaaataaaaaagatatttcaaataaatatttatgatctacaattctttcagatatagaggaaaatattataactaaatttaattatttaataaataaagaaagtaatgacaaatttcaattaacaccaaaaattaaaaaagaagatattttatttaaaaataataatatttatgaaatgttttgaaattgtatttttataaatcaagataatacatcaacttgatgtccaaattgtaaaaaaatatttttaaacaaatgaaaaaagtgaaaaatagaagaaattccttgaaatacacttttttgacattgaactggaaataatgaatgaaatatgaaacatttaacatatgaagaatatgataatttgtatgaaaaagatgaaaaatttaaaaaaaatcatacaaataaaaactgaaaaaaaatacaaaacaaatatttagctttaaataattgtaaattttatttgcaaaatcaaaatttttcagaatttaacttcataaaatcttgagataaccttgcaacctacaatatagccaaaaaatgactagaatatataaactctctaaactaa

SEQ ID NO: 244 - DNA, 3450 bp, unknown
  metagenome-derived sequence
  misc_feature (1)..(3450): Unk77 Cms1 native coding sequence; TGA encodes glycine
atgcaaaaatatgaagtaaaaaagactgttaggtttaaactgattccaattattaaaaattctgaaaatcttaaggtaagtttagaaaaacaaataaatctagaaaaatttataaaaaatttggaaaattacttaaataaattcaaaaatacttttttttatgataaagaaaaacatatttttaaaaacaaaattgaaattaaatataaatggctacaagaatttacaagaaataatttttatgaatttttgaataaaaataataaaaataaaaaatataagctatctgagataaattatttgccagttatttttaaagatagatttcaagaactagaaaatattatcaataacttaaaaattattgaaaatctaccagaagaaaatcaggaaaaaagaagtaaaattgcttactttataagacaattagctaaaaaagataattttgattttataacaagttttataaaatatatatcaaattcaaacaatccatacttagataaagatttaaaaaatttacaacaattagcagattttttgaaaaatgatttattactacttataaatagttatctaccttctcaatcagcttgattagaggtagtaaaagcaagtttcaattattatacaattgataaatatagtaatataaattttgaagataagttaaatgaaaaaaaagcagaacaaagacaaaaaataaaagaaataagggataatgataggtcatttagtaaaaaattttattgacaaagtataaaactagatgagaagtttttcaataaaatatgaataaaagaaaatttatatgaaaaaacattagaagaagcttatgactttataaaaaattttaaggcaaatgcaaaaagtcatttaatatcagatttaggaaaagaagaatttactacttatactaaatcttttaatacaattaaaaaagaagaaagaaaagattatatacaagatgcttttgatttaacttatgaaaattttcaaaaagttcatcctttatttgatatgacagaagaagattttaatgaattaatgaaattatctaaggaagtaagagagttagctaataaaaaaaataaaattttacaaaattattgagatattaaatcaaaagaacttgaagagaaaatacaaaataaaaaacttaaaaatcaagaaataacagaagaagaaaataaatttttagaaattaatgaattactaaaaattaaaaaagaagaaagatgaaaattttttaataaaccttgacaaaaagtatatacaaaaaattattatttattaaatgagctatttaaagatatagctatcaaaagatgatttttaaaagcagaaatagctggaattgaagaagaacaaaatcaagctagattattaaaatattggtctttaattacagaaaaagattgagaaaaatacttaattttaattccaaaagaaaatagaaaagaagtaaaaaataaaatagaagaacttaataatgactgagatataaaaatatattattttaaatctcttactcttaatgcacttaaaaagctttgttttaagaaaattggaaatacctttattaaacctgtttttcaagaattattgtttaaggatgataataaaccttattttaaaacaaataaaagatgaaaaaaacaacttaagagatatgatgaattaaatgaaaaagagcttattattttttatcaagatgtgttaaagtcagaagctgcaaatagacaattagatttagttgatttttgagaattaaataaaatttttgaaaaagattatagaaatattgaagagtttagaatagacttagaaaaagtatgttatacaaaattggttaaatgaatagatgattataattacaacaaattaataaatgaaaataatatcatagaatttaagattacatctcaagatttgaaaattttagaggaaaaagacgaaaaaatctttccaaaacataaaaataaagaacacacacaaaaatggttaaacttttggagcaaggaaaatccagaaaactattatcctacaagattaaatcctgaaattaagattttatatagagataagcttttagaaagagaaaattgaaaaaaagaaacaagatttaacaaagaacaatttactttatctactactttgggattaaatattcctagcaaaagacttgaatttagatttgataaaaccaatactatcaaagaaaaagttgagttttttaatgaaaaatttaacaaagaatttaaatgagaatggaattactgaattgatagatgaataaatgaactagctacattatctattataaaatggaaagatgaaacttatacttacaattgaaaaactatacaaaaaccagagtttgcaagaataaaagtatataaattaaaagatgagaatgtaacttgagaggtagaaaaatatgactgaacaaaaaaagaagtaaaagtaatagacaacatttcttattttacaggccaagaaaatttatttgaaagctttgaaacttgagtaatagatttaacacaagctaaactaataaattgaaaaattatcttaaattgagataaaaatacttatatgaaattaaaattattatcagctaaaagaagaatatttgaattatttgcaaattgaaaaataacagaattaaaatttgaaaggtgaaaaaatatattattttttctagataaagataattactattatcctatttattggtttacagaagaacaaaaacaaaataaaagtttaattgatgaaatagaaaaaaaacttaacaattactttaagtatatacaaaaaaataacctttttgaagataatgaaactatagaaaaaataaatcatttaagagatgctattactgcaaatatagtttgaataattaattttttacaaaaacaatttccatgaaaaatatttttagaaaatttagataaaacattactacaaagagaaaaattttcatataaaaaatgaaatgatggagaattaacacaaattgaagaaaaaatgatagattgacattttcagcaatcaaatactgatattagtagaaggcttgaatggtgattttatagaaaatttcaagaagattgacttgttccatcaaacttaaaacaaactatttttctaaaagatgatttctgaataaatcaatttggtataataaattatgtagaagtaaaaggtacaagctctatttgtccatattgcgaaaaaattactgaaaataaatgatgactcaaaaatcatataaataaaaatactgacgaaaatcataaactaaagcctaatttatcaaaaattgaagctaagaattgtatatataaagagctatataacaagaatttacaacttaattatgatagtatagctgcctacaacatagccaaaagatgatatgagtattttaattctttaaaataa

SEQ ID NO: 245 - DNA, 3648 bp, unknown
  metagenome-derived sequence
  misc_feature (1)..(3648): Unk78 Cms1 native coding sequence
atgaactcaaaagaacagaaacaacttgcatcaacatcggactattcttataacaaagcgatccgcttcaggctcgagcctgtggcaggacctcttccagttattgaaaaaggacattattctcttaatgatctaacggaaaaagcaggagtttttgccgataaatttgaacagtttatctataaaacatctgtaaatggcgcatttattgaaaataacaggggcgaaaaatttcccgacccgagggtttccattaaaaaacagtggcttaaattatatttcaaaaacgacttttatgcgtcgggcagaaagaaacagaaggaattcagtcttgataaatttaaatatattgaagaacctttgaaagagttcattactgaatggagaaacactctgagttctctgcgcatgattgcagttcagcctgatcattccaaacagcgccggagcgagattgctgaatgcttgtcggctcttgcatccaaatttcagtttcagcttctcagagacttttgcgaatatgcgaatcacaaggatgagcagaaatccctgaatgatcttaaaaatctttcagaagaagttgatcagattctgacttctcttgtaaatgattacctccctgctcagactgcaggcctggttgttgcacaaggttcaatgaattattatacagttaacaaaaaaccgaaaaattataaacaggaaatagagaaacttgaaaaggaactggaatctcttgatgctgaatatacaaagatgaagttgtataaagcagagcagaaaagcagactctatgaactgatcaacagcaacgcagatattgatacaatcaagcgcgaatgtccgttgtttgccgatcaggatgatcactgtctgaatgctgttattgacttaacaaaaaagattgatgaattaactcggataaaggatgaaaataacaaactttcagataagcagaaaaaagaacttaaagacttgaaaatagaaagagggtattattttatcaaaaaaactcgtgggaaaaaacatagttattattttaaagaatatgaaaagtattgtaataaatataaaaatattgcacttgaacgcggccggatccttgcacgcataaaaggcatcagatgcgaacagattgaaagtcagaatctgaaatactggactctgatctttgaaaatgaaggtaaaccgtatttgtgggcagttccaaaagaaaaaatgcaggaattcaggaaggagtttaatcatctggataaagggaacgccgttctttatattccgcattctcttaccatgcgggctttgcataagctctgcttcgctgaagaaagctcttttgccgaggaaatgagaaaaaaagactacggtctgtataagatgctttcagctgcaaaaaaagctacaaatgatgaaaaaagcagaaacttctgttacggaagcaccaaagacgacctctctcttgcttttttcaaagaactgatgaaaagtaaatttgctcatgaaattctggatttggatttttttgaacttgatgaacttcagacagctgaaaatctgaatgaatttgaggaactgcttgaaaaagcctgttattatatggaaccgctgtatttgaccaaggaatgtgcagaggagctgattgaagcatatgatattactgtattcagaataacttcatacgaccttgaagaacattacagaaatactcaccagactcctgagtcagagccgaagcggcatacaagagaaatatgggaaaaattctggaaatttaaaggtaaagaaggttcagtacgccttaatcctgaagtaaaaatccggttcagagaaaaagatgaaaatgtggtcagataccttgaatcgaaaggattcgatctgaaaaaaattcataaccgttatgcggaagatcagtacatactgactcttacattcactctgaatgcaggaaaacgctatccgcagcttgcatttgcaaaaactgaagatatctgcagagaaatagataatttcaatcagaaatttaatgaacagcactgggataatttgtataaatacggtatagacagaggtgaaattgaacttgcaactctctgtattgcaaagttccgcagtgatgatacatataaagataaaaatggtaaggttcatatgaaaccgactttcccgaacggagaaaatgatataaaggtttataaactgaaaaaagaatggtatggcaaaaaagtcaaatcgaatctggaaaccagaccgtttgatgaaagaaaagaaaaaagagttatcgcaaatatctcttattttattgacagaactgaagatcctgactggtttgaaaaatatacatgtacaacaattgacctcacgacagctaaagtaataaaggataaaattgttctcaacggcgatgtgctgacatatcttaaaatgaaaaaggaagcggccaagcgtgtgctgtttgaactggtagcagagggaaaactgaataargactgccggcagctrgtgtgggaaaaacatttttcatcaacagctttagtttttccgcatattaacgaaaaatgtgaaattgcttataatgcagccgctgatgtagtttattttttcgaagatgaaacgggcaaagattttgaaggtatgcttattaaagacgatattgcctatacaaaggaaaatgtgctgaacaatctgcagagttatcttgatacactgattgaggagcattctaaagactcttcggatattaacaagcatgttccgacagtttcaaagctgaaccatctcagggacgcgcttgtggcaaatatggtcggtgtcattatgtttctccagaaagagtatccgggaattattattcttgaggatattgaaaaaaatctgatgcagaaacattttgaagatatctacaataatatttcacgccgccttgagtgggctctgatcagaaaactccagacactcagtctgatcccgcctcacatcaaagatataatcgaaataagggaacgggcaagaaataaaaacaaggaagagtcatcatttcagctgggtgctcttgtttttgcagacaagaaaaataccagtgcgaagtgtccttactgtgataaaaaatggaaatggggaggtaaagaaaaagaatataaatttacgcagcaccgttatatttgcggtgaaaaacattcctgcggtttcgatacatacagtataggtaaagattttgaattcctgaaggatattgatgaccctgataaagttgcggctttcaatgttataagaaaagtgcttaattataaaacaatttcaaaatttgaaggtaaaatatcagaaaaagcagacaaaaacggtttcggacataaaaaagaatcatctcagcataaaaaatccggatctgcttcaatttcttatagaaagccaaaagtaaaaaaggaagagaaaagggaaaccgtaaaaataatagaaactttaagcaaaggaaatgccggatcagtaataaaagcattaaagaaactgaaaggtatgaatcttattcaatctgatatagaattattgtctgctgttctgaaaaaacgctctgattcaaaacagagctttaatcctcaggttaaggaatataaaaaattagcagaagaactaaagaaacaggcaggattctga

SEQ ID NO: 246 - DNA, 3171 bp, Unknown
  Metagenome-Derived Sequence
  misc_feature (1)..(3171): Unk79 native coding sequence
atgaaagattatcaaaatttttatgaattaagaaagacgattcggtttattcttgaacccaaggaaattaagaggccttatcagccgatagtcaataatgatgatttgggaaagcgaatagataattttataaataaatatggccatgccatacaaatttttagggaattaatttatgccgcgcccagagattctgaagagaaaaaattaagtaaaaatatctccgttaagcattcttggctgaggaattacaccaaaaatgacttttttaatgtgaaggaaaaaattattcaatatgataaagacaataaaaaacgaggtaacaaaattgctattgataataccaatataaaatttttaaatgattattttgaaaattggcttgaagaaaataaagaatgtatcgctaatttaaaaatatgtttaaatcagccggaagaaaaccaaaaaaaaatttccgagtttgcgtattggattagaaaaataaccaagcgaagtaattttgaattcatttttgagttattcaacggaagtattgaccataaaaatagcaatgaaaaaattgatgctgcaaaaaaagaattggacgaatgtaagccattgcttgcattattggaaaaagcggtcttgccaagccagtcgttgggagttgaaattgaatgtgcaagtttaaactattatatcgttaataaaaaaccgaaagattatccacaagaaatacaaaataaaaagaatgaattgcagcagggtcattctttttctagaaatgagcaaaatgtattaaaccaggtcggttttatagacataaaattacctattactgatttgaaggaagcgatgaaaaaatttaaggcggaacagaaaaaaatattttatgaatttgttaataagggagagatgtatcaagaattaaaaaataaggtggatttaaaattattgaatgatattagcgaaaataattttaataaatttgaaaaagaaacagatgatcagaaaagaggcaaacattttcaattttcttttcaaaaatataaaaatttttgcaatatttataaaaatgttgccgtaaagttcggcagaataaaagcgaatattaaatctttagaaagagaaaaagttgatgctgagaaattacaatcttgggcggtgattttggaaaaagacaaccaaaaatatattttaaccatttcaagagacgcgaaaaataatcttcaaaatgccaaaaaatatattgacgatttgcaaaacgagaatggcgggcaatggaatttgtacgctctcgaatcgcttactttgcgtgcattggacaagctttgctttggatcggataaaaatacttttatgccggcaattaaaaatgaacttctgcaaaatgataattctttttttataaatggtgatttaaaaagaaaagatcaattttcagaagacgggaaagagctgataaagttttaccagacggtattaagtttaggctcaaccaaggaaatgctggcgattgataattttaaaaattttgatgagcttgcgattaaagaatatggagaattggctgactttgagagattatttaaaaaaatttgttattacaaaaaatcaatagctatttctgaagatacaaaaaagaaaattgttgatgattatcaaggaaatttgtataaaataaccagctatgatttggaaaaagatgacgcagaaattttggcgtctttacaaaataaaaatcatcttggcagaagccaccccgaatttcatacaaaaatctggcttgatttttggacagacggaaatgaggaaaagaattacgaagttcgtttgaatccagaatttaaaataaattttgttgaaaaacatcccgacgaattaaaagatagggatttgggcaaattgaaaaaaaataggcggttaaacgaacaatttatgctttcaactactataactttgaatgctcacggaaaaaataccaatttatcatacaaaacgaccgatgatattaaaaaatatattgagaaatataatgacgagtttaacaaaaaaataaaaccatttgatatttattattatggattagacaggggaaaggatgagcttttaactctcggcttatttaaattttcagaaaatgaaaagataaaatttattaaacaagatggaacgccgggagaatataacaagccggaatttattgatctggaaatatatcagcttaagaaagaaaaatatttagcaaaagatagcagaaacagggtcgcttataaaagcattgatctatttctggacaacatcggaatcattgaaaggatttcagtagaatcgtgtattgatttatcttgcgctaaaatagtgaaaggaaaaataattttaaatggagatatagctacttatttggagttaaaacgagtaagtgctttgagaaaaatcttggaaggtgcagctaaaaataaattcagatcagataaaatttgttataatgcggataaaggaagtttatttttaaatattgaaaaccgcgggaaattagaaaatgatgatttatatttttgtgatgatcggtttgataatattttatctttggacgccattcaaaaagaattgcaggattattacgacggaattaaaaacaatagcggtaatgctgaaatgatcccgatagaaaaaatcaaccatctaaaaaatgccttgtgcgctaacgctgtcggggttataaattatttgcagcaaaaatattttggcatagtggcttttgaaaatttagatatggctaacaagaatcaacgaattagtgaattttcgggttatttgggcagtatgattgaattaaaattattgcaaaaatttcaaacgctttcccttgtcccgcccggtttgaagcaagttatgagcttgcaaaattttaaggagataaatcagattggagcggtattttatattgaaacatgcggaacaagcaataaatgtccgcgttgtggaacagaaaattccgataaatcgcagaaatggaatgcccatgcttataaatgtaaaaataataattgcaattttggcactacagaggacaaaactaggaatgatttaattgcgttggataactctgacaaggtcgcttcatataatattgctaaaaaaagcttagcagaattgcattccaagtgttctttgaaaaatgagtaa

SEQ ID NO: 247 - DNA, 3435 bp, Unknown
  metagenome-derived sequences
  misc_feature (1)..(3435): Unk80 native DNA
atggataagtatcaattaactagaacaattcggtttaaactaaaaagatttaacggtgcgttacaaactgaggtcgatatagcaaaaaaaagtaccagtgatcaagagttagagaaattgctcgaagagttaagcatgaatatgaattcatacaatcaacgatggagtgattttttatataaactacatgaaggtaaaaaaaacagaaggatattaaaccgtattcaagtcaccccaaaatggttagagttatatgccagacctttcttatatcacaaaacaagtcgtccaaaacatgggaaaccattgctgacggattatcatggattacctgattacatagaaaatcgtcttgaagaatggcagcatttaagagaaacccttgataaactgaggacaagacctgaacaccatcaggcacggagatcggagtatgctttattaattgaaaagataaacattccacaaaattttccattcttctatgctttagcagattatgcacaagataaggataatgaaaaatataaaaacgaattgatagtaataggcgaacgtatttattcattattgtcaagtttacgaaaggcttatgcacctgcacagcatacaggtattgaaatcgcacgagcttctctaaactattttactatcaataaaaagcccaaagaatatgatgatgagatagagcaatggctggaggaacaaaaccaagagtatacacttgccgacataaaatccaagttatcacttaatccaattattattaaaccggatattagagactcattaccagacaaggctacacttggtgaatggtacagtcatttaaaaacttttaaagcagagcagaggtcagctttggataattgtatgataactagcaaatcaattgaggaatggccaattctctttaaaaaaatcaatactaataaagcaaaagaactcatttcattaacaagcaaaatcactagcaatgcaaataaaataaataatttataccaaattctcaatgataagaaaaaaagcaaaagagcaaaggatgtagccgataaagaattaaaaacaataagaaataaccaaattcaaataaagcgtaaacgaggtagcatcattagcaaagcccctgattttaaaaactttgttgatgcctatgcaacaatcgcaaaagagaacggaaagattaaggcaaaaatacgtggacttaaaaaagaaaggcaagatagtcaactacttaactactgggcgcttttgttagagaattgtaaaagacatgaattacttctaatacctagaaagaatagaaaaaaggtctataaaattcttgaaaaactcccaaagacaaatgacaagggcgaagctagtgttatttattttaagtcattaacattaagagcattacataaacaaattttttctgaagattcaacattaaagcaaaacgtagtacaacaacttaaacatgattttcctgaaatggaaggcgcttactccatgaaagactgggaagagagtaaagtggtttctttatatcaaaaagtactcaagtactgtaatgatggaacattgagcattgatgtcggggattttaatattgaagaactagtatccagttcatatagcactattgataaattccgcattgctttagaaaaacagtgttacataaaaaggtgtctcatagataaaagtctttatcaggaattaagagagagagaagagtttcatttgctgtctattgaaagtaaagatttgaatagtagcaaacctattcaagctatgaacgagcatactcaattatggaaacaattttggtcagctgataattcaaaagaattttttcccatccgattaaatccagaaataaaaattagatttagagaaccaaaagatacaagaattgcgaaatatagaaaaaaatcaggtaaatatgaaaaagaatcaggtaactataatccaaaaaagaaaaatagatatctgcatgatcaattaacacttgaagtaacaatttctgaaaatgctactggacttcgtcaagaactggcatttacaaaaccacatggtttaaaagaagcacttgatgaatataaccaatcttttaataagtcatattatccaagaaataaacttgatgatatttgcttctttggtattgatcgtggacatactgagcttgcgacactattaattattaaaaagcccaatgataatcaagcatcttttcagaaatttacgacatatcgtcttatagatcttagtcattcgcgaaattatacaacacctgaaagagttgaaaaaactaaatacgcaaaaaacaatatatctgactttatcccagacattgagaacgaagatatatttgagaaacgtgaaacggcatcattagatcttactacagctaaactaattaaaggttacatcatagagaatggagacgttaattcttatttgaatctgaaaatgttaagtgccaaaaggcgaatatgggaaaaacatagtataagcaaaatacctgaagatatatctatttctcttgaccaagaaactggatactttagattcgatactgaaatagaggaattcaaaaatccaagaaagctctactatttcagagaagagctttctgattatttatctgaagaagatattaagaaggaattaaatagctatctaaataaattaagaacaaaaaaccaagaacgagatttattaacgttagaaaaaattaatcatctcagagatgccatatcatcaaacataacaggcattcttgcttatctactgagaaaaaaagaatttatacctggcatacttgtattggaagacttaaatacaagattgcttgagagtcacttcaaagataaatctaatgaaattctaggtcgacgacttgaatggaagatttacaacaaattatcaaaaatgaaccttgctccgcctcaaatcaaggaaagcacgctacttcgagaagacaaaaaatataaggtaaaacaatttggctctgtcttatttgttgatgaaacaggaacaagtaatgaatgcccaaattgtaacaaaaaacctactgataattttaaggaaaaatcagaaaaagatgagcaaaaaagattatttgaattaaataaatttcagtataaaaaatatcattgttatcattgcgggtatgataccaaaaccaatcagatggaatttactgatatcaataatcctgatgacttggcttgctttaatattgccaaacgcggttatgagtacatattaaatccaccaaaaccaaagaaaacaatcctcaaaaaaacatactctccaaagggaaaaaaacaacaggggagaaaacaggcgaaaaacccaccacgcactcgaaagaagcctaataaggcagctacccataatccgtttgcaaatctaaaagatatgatgaaaaaagataactaa

SEQ ID NO: 248 - DNA, 3570 bp, Unknown
  metagenome-derived sequence
  misc_feature (1)..(3570): Unk81 native DNA
atgaacaagtatcaaaaaacatctgctattagactggctttgaaagttaatgaaaattttgagtctaatttaaaaaatgcaatcgagacttataaaaagaatacagctgatcctgaagaattgtgttccagacttatagagattttaaagaaagtaatagaattatttgacaaagaagaagtaaaaaaagatgaatacaaaagtttactctacaagctaaaactttctccgcatatcattgggtcagagtttggtttgtttatttcaggttctgggcgagcagatagcttgcgcttaaatagtcgtaaacttaaagggttcttctcaactttatttaaaaaaacaaacgaatcactcatttcgctcgaaaaacaactaacagaaaaaaatacacccaatttttctcctaaaaatacaagaaaaatattagatgaaatctttaaaagctcactcgatatagaacatgagttgctaaaacgaaaagcgccaaccttaaaagaagcaattgatttgatccaaaagcaaaattatcattctgatgatcttgttccgcaagagtttgcagagttgcaaaaaactttagcaaaactatcaaaaattttagataagctcaaagaatcactctccatatttcacgaagtcataacagcatcgctaaacgaacatactcttacaagacaaactactctcgaagaaagagaaaaaaagattaaagaagaagaagataagttgacccaaaaagtttgggcgggggatcttaaagataacttaaattacataagcagatttgtagcaggtcataaaaatgcatttaaagcaacgatgaattatctaggaaaatcaattaatgataactttattacagtagaggaagcggggaaatggacaaaaaagttttacaaaattattgcggaaggttataaaactgaaataaaaggattgaaaaaagaggtagatgagcttgcaaagcagattattggttctgatttggaagaatttgtaaaatctaataaagacaaaataagagtaaataaaataaaaatagatcagaacataaaaaattctgcaataaatatttttaaaaaatacttgccagatttaccctcaaatattaaagatgattttctaattaaatttttgcgaaacagaattttaaaagttttaattgataacttgattggaaaagaaaacaaaaaatatcaaataaaaccagagcgcaaaaatgcagctaatgagctagcaaaaatcataaacaacaagtcagaagataacttggaagaatctcaaataattgaaattttgctcaataaaaaacaaaaggcggcgcacacagcaggtacaaattatacacacataataaacaaatctaactttattcaaaataaaaacaaagttgcaaaatatattggcaatataaaagcaaaaatagcaacatataaaaaggataaaaaaaatttaagccatctggcattgcttgttttagataaaaaagatgaaaactttgatttattacttgttcccaaaaaatttaaaaaagaatttttatacactcttgagagattaaatgaacctgttggagacaagaaaatttacaaaatagaatctttaactctccgttctgcaaagactttgataagtgctaatttgggcgagctcatcccattttttaaagctggcaaatggcatacaatttttgcatttaaagcgtttttgattaaatacttgcttgatgcaggatctattaatagcacaaaagcagcagcacttaaatgtaaagtagtagaagagtttaaaaagcttatagaatatgcatcacttggaggacaagaacaaaaagaagctgataaatttataggtgtcgtagataagcttatttgtaattcaaaaaatcgatttagtcatattgagttgagtcattcgtttgctgaaaaatcaatttcaattgtagagaaagattacagcgatgtagctgactttaaaaaagattttacagagctttataattttgttttagttgcaaatgtaaatagtggtaaattaataaaactaattcaagaagcacaaaagaaatttaacaacccaaacaatttgcaatttagcaatttgtttttacttactagctcaggagtaaaaggaaattacaggcaaaacagaagatacttaaaggaggaaaaagaattactccaaagtattaaaaaacaagattttgaatcaattagactaaacccagagattaagattttcctagaattaggacttgatactcaaagtagtgaagagctaaaagaattagcaagcaaaacaagacgtggtaaagatagactaagcattgtctttactattacaaaaaacgcaaaagaagaagaagactttttgccagcttttgcgcaagatgaagatttggagacaagaatatttgaattaaacaaagtggttaatgaaaacttaaaaaatgcggtaagaattggtttggataggggtgaatcagaacttgtgtctgctgtttttggaaagattgaggaaggtagagtaaagtttcagaaaatacaggtttactacatagattacaaaaagatatttgatgaaaatcaagaaggtgcagttaaaatatttttaaacccatcgcttttgtttgatgagaataagccttatacaaaatacaccaagcacttaatagaaaaagaaataagccaagaaaatttaagttatgcaaaagttattaaagataaagtgattatgaatgctgatatttcatcagttgtaaatcaactaatgtatatcacttttgcagatttgaacattgagcaggtagaaaaccttatagtggctgaacctgggtttgttgataaaacaaaaacaattcagcttaaatttaatggaataaattctaaaaaatttggaataaatgcaagttatttgtatttaaatgggaatattacagaagatgttaaagaaaatttcatttctgcttttttgataaaagtgttggaacacaagttgaagatatttaatgaacgagtattgccactcataaaaataggacaaatttcaatagatactttgcctaaaaacacaaaagaagctttggcaagcaatattgcaggtgtgatagcgtatttgattgaaaaagaatttaacaaccaagcgattattcaccttgaagacctatcggctcaattcaaggatgaccacagtaaaaacggcagggcaataagcagggaatttgaatgggctctttacagaagacttggaaaaattgaaaatgattttgatttagttccgccaaaattggggcaaacaatttactttgcagagatcaaaaaattaaaacaagcgggaattataaagtatttgccaactggtaaaagtagctctttttgccctgaatgcctacaatttaatttcactaataaagacggaattaaaaaatatataaaaattacgcaaaaatgtcagttttgcgattttgaaataggaaataatgagcttggaatagattctccagatactttggcggcttataatcttatttatccagaatttgaaagaagagcaataaataataactaa

SEQ ID NO: 249 - DNA, 3522 bp, Unknown
  metagenome-derived sequence
  misc_feature (1)..(3522): Unk82 native DNA; opal coding (TGA > Gly)
atggaaaaaatgcaaaatttgtttgaggttaggaagagtttgaggtttgagttgaagccttataaaattacaagagaaattttaaaatgagaagataattattgaagtttgagttcaaaaataaaacatataaaagaagatgaatttgaaaaagaatttgattggaatttattttgtaaaaataattatagtgattttataatacaatctaaaaaattaagtagttttttagaagaaataaatatagaaataaaaaaagaaaaatatggtaaaacaaaaaaatcagtattttttgactttaaaagattaaaatgaatttttaaaaatattccttctcttaaaaaattaacatattttagtaaagactttaaaaataaactagaagaaatagaagaaaattataaaataatatttgatttttttgaaaaattagaagataaagaaacaaaaaatgaaaaaaaatctgaaatctcaaaaaatttaagaaaaatatcatatttaaatagaaactttttaactatttttaaattttttcataaatatgaaagtgatgactttttagttgaaaatttagaaaaaataaaaaatgaaatttgagaaaactttgaacaaataaataattcaattattgcaagtaatgaaaatgaaaaaacttgaacttgtttttgaaaatacacttttaataaatattcactttttagaagggaaacagaaaaattaaaagatagatatgaagaaaatagaaaattattaaacgaaaatataaaaaagatagttgaaactacagaagaagacaaaaaaataaaaaatgataattgaagaaatgaaaatataaaattagaaactatcagaaatttagaattagaaaaagaaaatgaagaagttcaaaatttattaaaaaattttaattttgataggaatttagatgaagttatttcagaattagacaatataaattgagttattttaaataattatattcaagaatttattaaagattataaattaaataagcaaaatttaagctttttaaataaatcatatagtaaatataataaatgagaaataactttaaatagtaaaaaaatatttattaaagtaatattgcaaacattagagggaggggaatatttgcatttacttaaaaaagaatataaaaacttaagtaaaagtgaaaaatatgaaaagaaattagttgatacctttttaaaaattatttttaaaaataaagaaataaataaagattttaatacaataaaaacttttagagataaattagcaaaatatagatgaaaaattagacaagattttagagcaagtgaaagagaatttataaatgaagcaatgataaaatattatgctaaaattttagaaaaagattgaaattattttttggctttaactgaaaaagagaaattaaattgaaacataaataatattgaaattgaaaaacatataaaatgaagtatttcttcaaatacttttaaagtttataattattctcatctacatttttgagctttagaaaaattatctttaatgtgagattgagatttaataattaataaagaattagctatagaatggaataaatacaagaatcaaaaagataaaaaaattaatattgattttaaaaagtttcaaagtcatataattaaaagcctagaaaagttaagagatgatgaaaaatataattgagaaaattggactaattttatatctaaaattgaagaattaaaaactattgaagaaatagtgaattttattaattcaaatttttataagttagaaaaaaaagaaattttaacagaaaaattatttgaactagcaaaaaacaaagaaattgaattatttcaaatttataacaaagattttaatatttttaatgatgactttttatcttgagaagatgaatttttaaaagacttagaaaaatgatgagaacattgagaagaaacaaaaacaataaaaaatacaaatagagagaaaaagaaaaagaaaaatttatttactatttattttgaagagatttttaaaaatacagatacttttttatgacaagaatgatgaatattttttagaaaatgagataaggaatttgaagaaaaaagatttagaaaaaataaatttcttgttacttttgatattaaatttaataaatgaaaacaaaatcataatacaaaattatgtgagaaaaaagataaaattttagaaaatcatatagaagagataaataaatatactttagaaaaaataaaaaaaatagattcagaagatttaatagttgtttgaatagatagatgagaaaaagaacatattagttattgagtttatgattgaaatttaaactttaaatgaataatttgaaatacaaattttataaaaaaaatttgaaaagaacaagaagattttgaaattttacaacagtgagattatgaaaatataactttaaaaataggagataaaataataaaaacagaagaaagcatttataaacaattacaaacaacatataaatactttgagaaatgagaaaaagcagagaaagttgaggaatgatatatattagaagaatgagagaggttattagaattgaaatgagcagaagaatatcatatagaaaaagtgtttaaacagtgaaataattgaaaatattttgctgatttagaaaattgatgaaaatttattttaaatacagattcttattgatttactattttagataaagattgaaataaaattaatatagttgataaaaataattgaaaagaaataattgattattatttattatttgaagcagaaaaatttaaaagaatcttagaaataaatgatcaaattaaatattctgaaaatatgtttaatttaaaaaaatgatatatttcaataatcaaagatttttttaataaattaatttttaattataaaaaagaatgaaaagaagttatttttatttttgaaaatcaaacttcaaaaaagcattctatttgaaaaaatgaaaatgaaattacaaataaaaatttaggagcttctattttatctgatatagagttaaatattataactaaatataattatttaactaataaagaagataattataaattacaattaacacctaaaataaaaaaagaagatattttaacttgaaaaaaatgagataatgaagaattcaatttttgaaatatattttttattaatccttctaatacatcttctagctgtcctaattctaaatgtttaaaaacattatttgggcattgaacctgaaataatgaatgagatatgaaacatttaacagatgaaaaatatgataatttatatgatagtgatgagaaatttaaaaaaaatcatactaatgataaatgaagtaaaaaagaaaataaatacttagcttgagataattgtacttttcatttacaaaatccagatttttcaaaattcaactttataaaatcttgagatgatttagccacatacaatatagttaaaaaatgaatgaaatatataaattctctctaa

SEQ ID NO: 250 - DNA, 3078 bp, Unknown
  metagenome-derived sequence
  misc_feature (1)..(3078): Unk83 native DNA; opal coding (TGA > Gly)
atggaaaaatttaaaaatatttttgaagtaagaaaggctttgagatttgaattgaaggctagtaaaataactagggaaaatttagaaaaagaaaatatttataaaaatccagtaaatattttatataaaaataaacttgaaaaatgattaaattattcaagaacagtttttgaaaatgatttaaaatattttttagataattcaaaaaatattattttaaatttggaaaaaataaaaaatttgcttgataatacaagattttctgaaatttttgtggagaaaaaaatttttgaattaatagataaagatttttacataaaatttgctaaaaataaattatcttgatgaagaagttctagtttacaggaaataaaaaagaatttagattggaaatgaataaatttaataaaaaattattatttagaaatttttgaaaatattgaaaatttaataattagtattgaaaatttatcagaaaaagaatcaagcttttctaaaaatgagataaaaaaatttttaaggaaaattagtttagaatttattagaatatataattttttagaaaaatttgatataaaaaataaggattttaacaagaacttaaaagaatatattaaaaaagtaattaattttaaaactttttttgaagaaataaaatcatattattttataagtgaaaatcaatcaagttgaattttagttagaagattttgatttaatgaaaagtctttaaaaagaagacaaccaaaagaaattaaagaagaattagaagaaaatttaaaatcttttaatgaaaaacttgaaataaaagaaaaattagaagaagaaaggcaaaaattaatacaagattttgatttaaaattaaaaacagaaaaatttgaagagttattacatccagagaaatggtcagaaattaggaaaaagaaagaaaaaacaaaagaagaacaagaaaaattagatgatatagataatcaatttaaagaattaaaaaaattaagaaataaagatgaagaaataagtaaaaaaacacaagaacttaatagatataaaaaagatttatgaaatttaaaagtaaaaataaataatttagaaaaagaattagaaaataatttagctttaactcattatgctaaacttttaactaatgaaattaattgagaaaaactatattatttagtattaattcctattgaaaataaatttattttagatgagtacatttctgatgagtgaaatttagaaattttagagtataatactttaacattttcagctttaaagaaactagctttaagttatgattgaacaatgggaatttattgggataaaaaagaagaaataaataaaaagtctaatttaaaaagatggattgttgatttatatatagatttagaaaattgagaaagacaagaagaattttataaaattaaaagatatgtaataaatctaataaagacttataaaaatatttttggtaatatttattttgattttaaaaggctttatgatactaaatctttagatgaattcaaaattgaatttgataaacaatgatataatttaaaatggaaaaatatagatttagaaataataaaaaaattagaaaaagagtgaaaattagaattttatcaaatttacaataaagatttttataaaaatcctgatttttttgatatcccttactctataaaagaacaaaaagaagaaagacaaagaagaagaaaatcacaaaatgtaaaatgaaataataatttatttactatttattgggaaaattttataaatgatatagctaattgaaatgaagaagtaagactaaatagtgattgttgatattttgtcaaattaaaaaaagaagataaagaaaatcatagatatgatagaaataaaataatttgaaattttggattaatatttaatccaggtaaaaaacttacaaaaaaatatgatgaaaaagaaaatataaaaaaatttaatgaaatttataaaaaagaaataaaaaaagtaaaaaataaaagctttatttgaattgatagatgagaaaaagaattattaacattttgtttaattgatgaaaattgaaattgtataaaaaataaaaattgagaatatataatttgagattttaatttaattaataataaatgagattttatacctaaagacaaatgtaaatatatagatatttcttgaaaagaatataaggatttattaggaaattttttaccagattttacacatcctgaaaatataatttcttgaaagaaaagttttcaatttgatgatgaaaaaaatttatattattttaagttaaatcataatgctagactttatttactagaatgagaaaataaaagatacaaaatagtaaataaagaatgaaaagaaatatttttgaaagatgagaattgaaataatgttatagattattatttattattccaatcagaagtatataaaagacatatcttaaaaaagacttgaaatataaaattagaggatgttcaagaattaagatgatgatatatttctaatattataaaacagctaaataactggattgtaaaatataattgaattataattttagaaaaccttgataaaactcaaattgatgaaaaatgaaatatatataaaactaataaagaaaaggttttagaaaaaacattatgagcaactatttatcaagaaatagaaacattactaaatagaaagtacaattactttattttcaaggatcaagatatttgatgattacaattaacaccaaaagtaaataatatttcagatattaaaaatctagaaaaatctaaaaaaaatgtaaatttatgaaatatagtttttatagatgaatatttaacatcaaaagaatgtccaatatgtaaaaatcaattgtttagagataaaaagaaatgagataatgtatatcataatgaaaaatatccttgaaataattgatgtagttttgatactaggacaaatacttactgatttgatttcatcaaatcctgagatgatttagcagcttataatatagctaaaaaagggaaagaatatattgaaaatctttcaaactag

SEQ ID NO: 251 - DNA, 3360 bp, Unknown
  metagenome-derived sequence
  misc_feature (1)..(3360): Unk84 native DNA (opal coding; TGA>Gly)
atgttagaaagttttaaagatttatatgaggtgaggaaaaatgctagttttagattagaacctcaagaaaatgcagcaacaaatgaaaatttatataaccaagatgttgatttatctgaaattttaagcaagtacaaaaattttgtgtatgatttaaaaaatcttttgtatatagaaggagaaaaagtaactgaaaaagaaaaagataatgatttatctgtagataaattagattcttcaaatgttgtacatataaatcataaatatctttcaaaatatttttctaaagagttttttgaaaattatgatagaataataaaaagaaataaacactgagcaaaaacaaaaaactggactacaataggaaataatgattttcttgaagtattttttagatcattttttaacaatgcatttgaaaatataaataaacttcaagaacttatagacacaaaagaaaatgaacaaaaaagaaaagctgatatagcttttgaaatcagaagactattatcaagaaaccatttatgaaaaatttttcctctttttaaaggtggatatttaacacataaaaatgatataaaaactataccagaacttacaaatcaagcaaaagaactaaaagagttactagataatgcaaagatttattttctagaagattcaaatttttgagttcaagttgagcatataagcctaaattattatactaggaacaaaactcagaaggaatacgatgaattgattaagggaaaaaagaaattattagattctccttacaataaagatatttcagaattatattgaattgatagaaatctaccaataaaacaactatatgaggaaatgaaaatgttcaaagcaagacaaaaaagtgctttctttcaacaactacaaagcaaaacaccttttaaaaagtttaaagaaccatttacttttactgataatgagtgaataaaacataaggaatttagaacagagctatttttcgatgttgaagaagaatattacaataaaatgttagatttaacaaaaaagattgagaaatcaggaagcaataaatttaaaaaagaaagatgagattttttactatttcaagataaatgaacaaaaagttttaaatgatggagttgattttgttctgaatataaaaaagttgctatggaatattgaaaaagaaaagctgaaagtctatcactagaaagagaaaaaatattagcagaacaagaaagatgatggtgagttttttctaaagttaataatgaattctatataaatacttttcctatagacaaagtaaaagatgcctatcaatcactttcaaaaaagaaaaatgattgagaattatcatattttatattaagttcaataactctaagagcattaaataaactttgtttttcaaaagactcaaaatttataaacaaagaaattcttataaagcttgataatgaatttttaaaagaaaaagaatataataataaaacaaaagaaatagtactaagaaaaaaatctgatttaacagaattaaaattaataaaactttattataatgttctagaattacaaaattctttaagaatttcatataaaaactcagattcatttgataaattgaaatcttcaaagaatttagaagagtttgaattaaatctaaaaaatgaaacttataaacttgaagaatttaaaactactgaagatgaatttaataaaattcttaaaagtaatgaatgaaaaagttacaaaatcataaataaagaaaaatgaaactttgaaaaatggtggaaaaatttttggaattcaagtaaagattgagagataagaataaatcctgagttaaatatttctttaagaaaatgaaatgaagattacaatgataaaatatctttccatagaaaaaaagatgatgtttatttattaaatgtaaatttttctcatttcgcaaatagaagctatattgattcttcctttatagaagatgataaaagaaaagaaaatttaaaaaagtttaatgatctttacaataagaatataaaacttaattatttctattgattagacaaatgaacaaatgaacttataactcttggtttatttaaaaaagagtgaggaaaaataaaaagtgtaaatatttcaaaagaaattccagtatacagaataactagaaaatgattattacattcaaaagtcacttttaaaaaagctcctaaagagtgacaaaacccaaaaactatacatactttatataaaaatccttccttgtttattgatgaattagacaatgaagagatttttgagaaagtaaatatagaatcatgtttatgaaatctaaattctgcaaaacttataaaatgaaatatcattttaaattgagatattcttacaaatttaaatcttcataagctatcagctaaaagaaaattatatatagcaataactgaatgaaaaactataataaaaaatatctgatttgatgaaaaagaacaagaaaattgagcatttttttatgaatatataaataaaggaaaaacagaaaaagaacctgttttttatataaatgaagaattcttaacaatcgtaagtttagatgaattaaaaaatgaacttaatgaatatataaaatatattaaaaatgaaccaaatgaatataaaaaatatatgtgaaataatgcattggacacagatatttcaatgttagcaataaataaaataaaaaatgcactttgtgcaaatattattggtattattatgaagcttcaagaaaaattccctggatatgtttgttttgaaagcttaagtaacgataataataatagagacatggaaaaagaacactctttcttatgaaatcttataaatgataaactttacagcaagctaaatataaatgcttcagtacctcctattttaaaaaaatttcgctcagaactaaaaaattcatattatcaatatggtcaagttatatatgtaaatgaagattctacatcttctgcttgtcctgtttgtaatgataaatttataaaatgaattaataaaaaatgaaatttagaagaatataaaaaaaacaaactttatggacatctaactgaatctgaaagttctatgcatcatttaacagatgatgaatataataaaaaatatgataataatgacaaatttagagaaaaacatacaaatgacaaaggaaagaaaaaagataatatttacagaagttgaaattgatgtaactatcatatgaaagacaatcctaaatgatttgatttcatcaagtcttgagacgacctagcaacctacaacatcgcaaaaaaagctttggaatacttagaatacctagaatcccaaaacaacgatgaaacaaaataa

SEQ ID NO: 252 - DNA, 3120 bp, Unknown
  metagenome-derived sequence
  misc_feature (1)..(3120): Unk85 native DNA
atgaatcaaatacaaataagaaaattagattatcaactaactaaaaatataggattcttattaaaagatgttattttagaaaaatggcttgttcaaaaaagcgaaaatttaaaatcttcaagattaagtataaataaattagaatttttaaaaaaattaaataatttattagaagatttattttcaagtaaagatgtgggtttgattgatagatttttattttacaagcatgagaggggttttaatttatttaattatgaattagataagaaatttttatgcaaatatgatttatattctggaaaaacaagatactcgcatttagcttttaataaaatgagtttcaaaaaaattaagggattttggttatatttcagccgaaggatagaagaggaaatattaaatcctctaaacaattatttaaatctttacgaaaaaggaataaatccaaaagaaagcgaaattagatctgttttaagaaaatttcaaggtagatattattttgaattattaaaggaattttttgacggattaagatttaattataaagaaaagaatataaataagattgattttgaggcaaaaataaaagacattaaaaataaaataaattctataaatgaattaatacagaaaaatccttttgaaaataaagatgaattgactaaattttcttttaactattatacattaaacaaaagacctttaaattatagaggcgatatagatgatacccaaagtatagaaaattactataaaagtttaaaagaatcttatgaaaaaagcctaaacgaaaaaataaatcaatttgaatttattaaaagatataacaatattataaattttgttaataaaaatttgggcgaaaatcttctaagttattctttagaaaatgcggttgaaaaactaaaagaatttagagctacaattaaaagtaatttttataaagatataaatagggcagataaagataaattagatttaaattattttgatcgcgcgcatcccctatttaaatttaaagataaaaattccttcaataaatttttaaattcaaaagttgatgatataaaaaaatattttaattatgagtttaagggctacaaaaatttatgcaatctttatcaaaaactagcagttgaaaggggaaaaattaaagcacaaataaaaggattagaaaaagaaaaagaagaatttattaaccttaaatactggggttttattgctgattataataatgaaaaatatttaattttattaaaaaaggaatttagaaaagactttaaagattatcttgattcttacaaagaagaaaagccagactttactttatataactttaaatcatttacttttagggctttagaaaaattaatttttaattcttataataatgatttttttgaaggaataaaacaagatgaaagaatttctgatcttcttaagaaaagcaacataagagataaatacaaaattaaagaaagtttaaacaataaagatttaattttgttttataaatatatcttaacctcagaatatgccaaaaacaatctagatttagaagactttaatttggaagaggttttaagtaaagattttgataatattgaagattttagaattgcattagatggcgcttgttattttataaaagaaataaatttaagttggaataagtttattaacgcatggaagaataatgtttcaatatttaagatatatagttatgatcttataggcaaacagaaagaattaaaatttcatacaaaagtttggaaagctttttggagctcttttaaagatagccgtataagattaaatccggaaggtagtattttcctaaatgttgttgacgaagatgagagaagaacgattttattaaagaaagaaaaattagaaagagaagggaaaaaatttataagaaatagaaaattggaagactattattacaaggcgttatttaattttaacctctattttccttcaaaagaaataaaaatatcttttaaagaaaaagataaaatagataaatcaatagaagaatacaataacaattttaatcagcaaaacgattttaaaaatttattttatattggtattgatttaggagaaattgagcttgctacattggggataataaaatttaaggatagttctagtaattttgaacttcaaaagattaaggcatataaaataaaagatgaattcattaatccacaaaatattaaaaacccatctcttttagatgataatttttttgaagaagtagagttagatagcttagatttaagtaaagcaaaattaattagggataaaattgttataaatggagatattagtacctacttaaaattaagaatcgtctctgctaaaagaaaattatttgaccttgtaaaaaaacaaggagaagctttagctaatgaaaaaatatgtttctataatgagacaaaaaataatttaggtgtcaatttgggtaatgatgtgtttgttcttaaaaagaataacaaaaaagaaaaatatttaagagtttacaaatacgatccggaatttgaaaatatttgtcctaaggaatatctaaatgaggaattaaataattactatagatctttgttaaaagatgaatctattaattattatgaagaaatcaatagtttaagaaaagcaatttcttctaatatagttgggattgcttcttatttacaagatattttccccagtattttagttttggaaaatttaagtaaggaaacaagagaatatcatatgagaaaggagaatttctttttagattcacaagtagattggatgatttacagaaaattagaaacaaaaaaactttgtcctccgaatataaataattttaagttcctaaaagacttagaaagcgaaaatggcgtttttcaattagggggtcttgtttttgtatctgagaaatcaacaagcaaaaaatgtcccagatgcggcgcagaagaacttggtctatctgaagaaaaatttaaagaagcaaaatttgaacttagaaatatgaaatgcgagcaatgcagtgaagaatttcatccagatttaatagcctgtatcaatatagcaaaatcagcctttgattttttaaatagtaaataa

SEQ ID NO: 253 - DNA, 3474 bp, Unknown; identical to SEQ ID NO: 166
  metagenome-derived sequence
  misc_feature (1)..(3474): Unk86 native DNA (opal coding; TGA>Gly)

SEQ ID NO: 254 - DNA, 3390 bp, Unknown; identical to SEQ ID NO: 237
  metagenome-derived sequence
  misc_feature (1)..(3390): Unk87 native DNA (opal coding; TGA>Gly)

SEQ ID NO: 255 - DNA, 3885 bp, Unknown
  metagenome-derived sequence
  misc_feature (1)..(3885): Unk88 native DNA
atggaagcaataaaaaacaactatcaattaagcaaaaccctgcgttttggattaacacaaaaaagtaaaacaagaaaagatggttttacaggagaaatctaccaaagtcataacgaattaaaagacttggtaaaaagttctgaagaccgaattaaaaaatccgtatcaacagacgaaaaatccgagatgagtttgtctgttgataaaattagatgttgtcttgtgatgatttcggattttcttagtagctggcaacaagtttattctcgtgccgaccagattgccttagataaagactattacaaaatcctttgcaaaaaaattggctttgacggtttctgggttgatgagcgatatgatagaaaaaacgacaaaacagttagaacaaaaaagccacaatcccgaaccataaatctttccgaattagacaagaaagatgacaaaggcatcgaacgcagacaatatctcctcacttattggcgggataatctgataaatgcagcagataaatttgaagtagttactgaaaagttgaaacagtttgaagatgctttgaatattaaccgaacctataataaaccgaatgaagtagaattgcgaaaactattcttgtcattgacgaatattgttcaagaaacactgcaaccgctttgtctgggacaaatttgttttcctaaattggaaaaaatagatgattcaagaactgaaaataaacacttgattgattttgcaaccgattatcaatccaaaagtgatttgctttctgaaatttcagaattaaaaaaatactttgaagaaaatggtggtaacgtgccttattgccgagcaactcttaatcaaaaaacagctgtaaagaatcccaattctaccgacaatagcatagactctgaaattaaaaagctcggtcttgacaaaatattgaaagagaataaagatgctttgtattttgccaataaaatttacagtttgtctgccaaagaaaaactctcaaaattagatgataaaactaccggattgatagaacgtagcttactgtttaaatataagcctgttcctgctattgtacaatacgaaatagctaaaactttaagcgaaaccatcaataaaagcgaagaagatttattggaatttcttcgcagtattggacaaacgaaaagtcctacaaaggattatgccgatttacaggataaaaacgatttcgatttagatgcttatccgctaaaagtagcatttgatttcgcttgggagaacttggcaagaagtatttatcatagtgatgcggatattccggttgctgtttgtgaagggtttcttaaaaaaaactttggcattgataaaagcaatgcagatttcaagttatatgcacaattacaggaattaaaggctgtgttggcaacattggaatacggaaatccaacaaataggcaaacgtttataaatgaagcaacaaaattgttatccccaatatcttgggataaaatcggtcgaaacggaaatcaaaataaatattctattgaaaaatggctgaaaactctaacaaaagatgataaagattataaagatgccaaacagcaaatagccttgtttagaggacgattgaagaataatattaagacttttgatgacattacgaaatattttaaatccgttgctatggaaatgggcagaacctttgcccaaatgcgtgataaaataaccggtgcggcagaacttaacaaagttacccattatgccataattatcgaagaccaaaattttgataaatatgttttattacaggagtttgtcgataaaaaggagaatagaatatatgcaaaaacagacagacatcacagcgattttacgacttattcggttaattcggttacttcaggctctattgccaaaatgctcaggaaaaagagaatggatgaattgaatagaaataacagaaatagttttgaacagaaacctgaattatctgaagaacaaaaagaacagcgtaacattagagaatggaaagagtttatagaagataaacgctgggacttggaattccaattaaatctcagcaataaaacgtttgagcaaattaaaaaagaagttgatgccaaatgctatgaattggatataaactatatcagccaagaaactttatccgatttggtaaataaaaagggttgtttgctattgccgattgttagtcaggacatagcaaaagaaaataaaacagaaggcaatcaatttaccaaagattggaacgctattttcactcaagaaactccttggagactaactccggaatttagagtttcttatagaaaaccaacgccaaattatccggtttccgacaaaggagacaaacgctactcccgcttccaaatgatagctcatttcttatgcgattatcttccaaaatccgatagctatatttctaattgggaacaaattgcaaattataaagatgataaattgcaggaaaaagcggtaaaagaatttaatgcagatttgagaggacgaacggaagaagaaaaacaaagtgaatcggtgaatgcgttgcttgcccattttggaaaccagaacaaaaaacaaaaacctgttgagcgacctaaagaaaaattttatgtctttggcattgaccgcggacaaaaagaattggctacgctgtgtgtaatagaccaagacaagaaaattgtcggtgattttgatatttatacccgttcatttaactccgaagcaaaacaatgggaacataaattacttgagaaacgtgttattctcgatttatctaatttgcgtgtggaaacaactattgtaatagacggaaagccggaaaagaaaaaggttttggtggatttgagcgaagtaaaggtaaaagacaaagatggtaagtattcaaagccgaataaaatgcaggtaaaaatgcagcagttggcgtatattcgtaaactgcaattccaaatgcagaccaatccggatgctgtattagaatggtatgcaaacaacaagaccaaagaacaaatcatgtctaactttgtagataatgaaaacggtgataaagggttggtttctttctatggaactgccgttgaggaactgaatgaaaccttgccgattgataaaatcgaagaaatactcaaaaaatttcaagagctgaaagataaagaaaaacaaggtgaaaccgttaaattggaaattgataaacttgttcagctagagccggtagataatttaaaaaacggagtggttgccaatatggttggcgttattgcttatttacttcaaaatcttgattatcaggtctatatttcactcgaagatttatcaaaaccattcagtggtcaaattataggaggaatcgccggtgtgccaacaaaaacaaataaagaggaaggtcggcgtgccgatgtggaaaaatatgccggattaggtctttacaatttttttgaaatgcaactgctcaaaaaactattccgcattcagcaagacagccaaaatattttgcatttagtgccgcctttcagagcaatgaaaaattatgaccatgttgccgttggcaaaggcaaagtaaaaaatcagtttggtatagtcttttttgtggatgctgatgccacttctaaaacctgtccatgctgcggttcatcaaataataagccaaatctgaagatgtatccaaacgctaaaaagggactatcaaaagaagggaaggaagtttgggtagagcgtgataaatcggaaggtaatgacattatcagatgcttcgtttgcgggtttgataccacaaaagattattccgaaaatccgcttagatacattaaaagcggagatgataatgccgcctatctgatttctgcagaaggaattaaggcttatgaattagcaacaacattagtgaacaacaaataa

SEQ ID NO: 256 - DNA, 3867 bp, Unknown
  metagenome-derived sequence
  misc_feature (1)..(3867): Unk89 native DNA
atgattatggaaaatatcaaaaacaattatcaattatccaaaacacttcgttttggcttaacacaaaaacaaaatggaaatagctcaaatacagataatgtttatcatagccatagtgctttaaaagaattagtggacatttccgaaaacagaattaaaaaaaatgtttctacagagggagcaaccgaaatgcaattatccattgaaagcattagaaaatgtatgattatgattgagcagtttattaaagactggaaaagagtatattatagatcagaccaaatttctttagataaagatttttacaaaaagctaagtaagaaaattgggtttgaagcattttggtttgaaagaaataaaaaaactcaacaaaggataaaaaaacctcaatcttgcataattgctttgtctgaactctcaaaaagagataattttggaaaagaacgtcaagaatatattgttgaatattgggaaaataacttgctaaaatctacagaaagatacgaagaagtaagtgaaaaattagaacagtttgaattagctcttaaaatcaatcgaacagacaatcgcccgaatgaggtagaattgcgaaaaatgtttctatcgcttgtaaatatggttcgagaagtagttgagccactctgtttgggacaaatttcttttcctaaattagagaaattagcagacaattctaaaaataaacaactacgaaaatttgcaacagattatcaatcaaaaagtgatttattgacacaaatttctgaattgaaaaaatattttgaagagaacggtggcaatgtgccgtattgcagagctacgctcaatccgcttactgctgtaaaaaatcctaaatctactgatagtagtattcttgatgaaatcaagaaattaaaattagatgttatcttaagagactaccaaagtgttgctctttttgataattccattcgagatttgacagcatcacagaaaatgcaattgcttaaccaaaataacgaaggccttataaagcgtggtttactattcaagtacaaacccattcctgctattgtgcaatatgaaattgcaaaagtattgagtgctgaactcaacaaagacgaacaagaattacgaaattttttaagagatattggtcaggttaaaagccctgccaaagactacgcagaattgcaagataaaaaagattttgacatcaatcattatcctttaaaagttgcttttgactttgcgtgggaatcgcttgctaaatctgtttatcatcccgatatagatttcccagaggaacaatgcaaaacattactaagggaagttttccaagtagatgaaaacaacgaaaattttaaattttatgcccaacttttagagctacggtcgttacttgccactttagaacacggaaaaccaacagaggtaataacaattgaaaacgaagtaaagaaaattctcgaaaatattgactggagtaaatttggagatagaggcaaaaactacaaatcggctattgaaaattggatacacaatagaaacaaaaaagattttaaaggcgactatttcaaaaaagccaagcaacagataggtttaacacgtggtagacaaaaaaatttaataaaaaagtatgacgaaataacaaagtcttacaaagacattgcaatgaaaatgggcaaaacttttgccgaaatgcgggataaaattaccggtgcagccgaactcaataaagtatcgcattacgcaatgattgtggaagataccaatcaagacaagtatgttttattgcaagaatttgtagaaaataataaggatagaatttatgcaaaaagtactcctcaaaatgaagattttaaagcatattcggtcaattctgttacttcttcggctatcgcaaaaatgattagaaaaataagaattgacaagctacaagcaaatgaacgaaacaataatagacaacaagcaccagaactatcagaaactcaaaaagaggcaagaaatatcaaagaatggaaagattttattgcggaaaaacgatggaattatgagttcgatttaaaattggacaataaaaattttgagcaaataaaaaaagaaatagactcgaaatgctttaaattagaaaccaaatatatgagcgaggaagtacttgttgatttggtcaaaaatcaaaattgcctgcttttaccaattatcaatcaagatttagctaaaaaaataaaatccgagagtaaccagtttaccaaagattggaatgccatttttgcacaaaacacaccttggcgacttacgccagaatttagagtgtcttacagaaaacctactccaaattatcccaaatccgaaagaggtgataaaagatattctcgttttcaaatgataggtcatttcttatgcgattttatccctaaaactgctgattatatttcaaatagagagatgattgctaattttaaagatgatgaaaaacaaaaacaaacgattataaattttcatgaaagattaaaccctaaatctgaaaatgaaaaaatgaacatgttgttagctaaatttggaaataaaaattcaaatcaatctaaagaaacaaaaaaagaagaaaaattttatgtgtttggaattgaccgcgggcaaaaagaacttgcaacactttgcgtaatagaccaagataaaaaaattattggagattttaatatttacacccgctccttcaacacccaaaacaagcaatgggagcatcaacttttagacaaaagacatattttagacttatctaatctgcgagtcgaaacaactattgtaattgatggtaagcctgatgtgcgaaaagtattagttgatttgagcgaagtgaaagtgaaagacaaaaatgggaattacacgaaaacggataaaatgcaagtgaaaatgcaacagttagcatacatacgcaaacttcaatttcagatgcaaacgaatcctgatactgtgttggaatggtacaataaaaatcaaacaaaggaggcgattttaaataactttgttgataaaccaaatggcgaaaaaggcttagtctctttttatgggtctgctgttgaggaattaaaagatactttgccgattgaaagaattgaaaagatgctgcaacaatttaagtctctaaaaaatgaagaaaaagaagggaaagatgtaaaggctgaaattgacaaattgatacaacttgaacctgtagataacttgaaagcaggtgtagtggctaatatggttggtgtgattgctcatttattaaaagaatttaattatcaagtatatatatcattagaagatttatctaatccttttggtagccatgttatagatggaaccaccggaactcattcaaaaacgaataaaggtgaaggtaaaagagccgatgtagaaaaatatgcagggctgggtttgtataacttttttgaaatgcaattactcaaaaaactgttccgaatacagcaagatagccaaaacattttacatttagtacccgcatttagagccgtaaaaaattatgaaaacatcattgcgggaaaagataaaattaaaaaccaatttggaatagtattttttgtagatgccaattctacttcaaaaatgtgtcctgtttgtaattctaccaatgaaactaatagagagtacccaaatgcaaaaaaaggaacttctaaagatgataaagaagtttgggtagaacgagataaatcaaacggagacgacataattcgctgttttgtgtgtgggtttgacacaactaaaaaatatgaagaaaatccactaaaattcattaaaagtggtgatgataatgcagcgtatataatttctgcttttggcataaaggcttatgaattagctaaatcagtaattgataacaagtaa

SEQ ID NO: 257 - DNA, 3900 bp, Unknown
  metagenome-derived sequence
  misc_feature (1)..(3900): Unk90 native DNA (opal coding; TGA>Gly)
atgatcatggtaaatctagaaagttttaaaaatttgtatgaagtgaggaagaccgtcagattctgattaaatcaacctaataagaaaagtaatattaataaaacgcattgacaattaaaagatttggttgacctttcttttgagagagaaaaaaaattaattaataatgaaaaaaatcaagtattaattgattcagagaaagctcttatagagaaattacagcaatatgtaaattgactagaagtacaactagaaaactgggaatgaacatatcaaagatatgatttaatagctataaataaagactactataaaatattggcaagaaaagcaaaatttgatgctatgtgggagattagtaaatttgataaaaaatcaaataaatatataaaagttaaacaaccccaagcaagccaaatttctttatcatcattaaagatttgaaatagaagtgatagtattattcaatattggtgagagataattgagaaaacagattatttactcaatatttttaagcctaaattagaacaatacgagagggctattaatgatgctaatagtactcatattaaacctgatagtattgactttagaaaaatctttttacaacttttgaaactaactaaggaatttttacagcctttattggatagatcaattatttttgagttttcaaagaagaaagtttctcaacaaattgaaaagatttctgagtttgcttgagaaaaaaataatacaaaaatttataatgtattgaaaaattgagaagaacttagacaatattttgaagcaaattgatcccaagttccatattgaagagtaagtctaaactattatacagcagtacaaaaaccaaataattttgatcaagaaattaaaaaagctatagacgatttatgaataataaattttttgaagaaaagtgatagtcaaattatcgattatcttcatcaaggatcaaaacagaaaataaaattattacttacttcaaaatctccttattctattgagttattacagttatttaaagtaaagcctattcctttttcagtaaagtataatttggcaaagttcattgagaaaaattataagaatgaaattaatttatcttatgaagagattttggataaattgaatttgttatgaagagctattgatatcgcaaatgattttaaaaattccaataatcaaaataacttttctcttgatgaataccctgtcaagttagcctttgattatgcttgggaaaatacagcaagaagtttaaaaagaactatacctttcccaaaagaggtatgtaaacaatttttaaaagataattttgatgttgatgttaatgtcgataatgcagattttaaattatatgccaatcttttattcatagcagataatctagcaactattgaatataataatccaaataatgaagcagaacttataaatgagataaaacaagtatttgactctatagacttttcttttgataaagaaagatattgatgatataaaaatgatgttttagtattgctaaataaggcaaaacctcaaagagactattccactatattaaaagcaaaacaagaattgtgattattgagatgatgactgaaaaataagataaaaaaatacagagatttaacacagagattaatagacaaaaaggattcacatttttgaatcgcaagttttgtaggaaaaacacttgctaaaataagagatcgactcaaggaagaaaatgaacttaataaaatttctcattacggagtaattcttgaagataaaaatcaagataaataccttcttatatcacaacttgatggaaaagatacaagagaaaaaatatctcaaaaatttggcaatggagatataaaggtgtatcaagtaaattcttttacttcaaaagcattaaataaatttatcaaaaatcctttgtcagaagatgcgaaaaaatttcactgagattttagatataaacataaagaagtttcaatatatgatgaaaaaggaaaatggacatgatatcaggaaagttttttaagtcatataaaaaagtgtttaattgactctgagatttcaagagaacaaaattgggaagcctttggttggaattttgctggttgtaatacttatgaagagatagaaaaagaagttgattctaaatgatatcagttgactgaaaactttatttcaatagggaatttagaaagcttggaaaaagatgaaggttgcttgttatttcctattattaatcaagatatttcaagtcaaaaacaagaaaataaaaacatttttactttagaccttgaaaaggtatttgagtgaaaagaatgtaggattcatccagaattttctatcttttatagaaagcccatggaagaacacaagaaggagaataaatcatgaatcataaatcgttttggaaggttacaactattagcaaatcttggtatagaatttattccaagaaactcttcttttaaaacaaaaaaagaacaaaatagaattgcgattgatcaaaagaaacaaaatcagttagtgcaagagtttaaccaagaaaaagtaaatacatattttgaaggattagataattattatatttttgggatagatagatgaatcaaacaactagcaactttgtgtatcacaaataaaaattgagttatacaagattttgatatttatacaaagcactttaatagtgaaagtaaaaaatgggaatacaaatttcatagaaaagattgaatattagatttaactaaccttaagattgagtctgataaaagttgaaataaatatatagtagatatatctttatttcaagctaaagatgaagattgaaatcctaccggcacaaataaacaaaatatccaacttaagaaacttgcatatatcagaaaattacaatatcaaatgtctgcaaatgaagaatgagttttaagttttttggaaaaatataagaacaaagaggaaagagaacaaaatatgaaagaactaattactccatataaagaatgaaaaaattttgtagatttaccaatggatatttttcaagaaatgtttgaaaattattatagattaaaaactgatcaaaatttgtctgaatctgagaagaaaaatcttatgaagatcactacagagcttgatgcaagtgaaagcttgaaaaaatgagtagtcgcaaatatgataggagtgatttattatttgatgaaaaaatatgaatataaagtgaagatttctcttgaagatctttcaaatgcttggtttttttcaaaagatggactttcttgagatgttgtgctaaatacgaaaaatgatggaacaatggatttaaagaaacaagataatctagcgcttgcttgagtgtgaacatatcatttctttgagatgcaattgttgaagaagttatttaaaatttctaccgaagaatgaattttgcatttagtcccaagttttggaagtgtaaaaaattacacagaaatttttaaggataaggggaaatatgtatataaacagtttggtattgtttatttcgttgatccaagaaatacaagtaaaaaatgtcctgtttgtttaaatacacaaacgacttgaaaaaaagaatgaattccaattataaatagaaattacaaaaaatctaatatattttattgtgaaagatgttgatttcaatcaatacacagtcattgccaagaagaaaatattaaagatagtaatggttttcattattctgtagaagaagtagagagaatagagatgaaaaataaagaagcaatagaaaaatataaaaaacaatgaaaaaatcttcattttataaaaaattgagatgataatggtgcatataatatttgagagaaaataagagaacttccaaaaaaatcagatgtaaagaatacctag

SEQ ID NO: 258 - DNA, 3141 bp, Unknown
  metagenome-derived sequence
  misc_feature (1)..(3141): Unk91 native DNA
atgacaaataataacttacaatatttacgaaaatacgaattacgaaaaacaattcggtttttattgaagccagttgatcatactcctaccgatacaaatcaagattttattgaaatgcttaggtcttttgttacttcttatgaagaaatagttaacaacgtgaggcaactgcttttttataaaaaagatggacagaataccgaactttcaagatatataaaaattaaacacggatggatgaaggtatatacaaaatcagaattttttgctggtaaacagcaaattataaaaatttataaaggcagaaaacagtcaaataaaataactatcaatgagcatagcgtttcttttttgaaggaatattttgaaagatggcttgaagaaaataaagaatgtatcacattattgaatacatttttaaatgctccagaggagagtcagaaacgacgttccgaagcgattttttggctcgtaaaaataaataagcgaagtaattttgaatttattgccgaattatttaacgggaatattgaacataaatcagataattccgatattgcaattataaagacgaagcttggtgattgtaaaactttattattacagcttattaatatttttagtcccagccaatctcttggcatagagctggagcgcgcgagtttaaattattatacggttaataaaaaaccgaaagattatccaaaagaaattcgagataaacaaaaaagattggatgaaacatataccttccaaaataatgagatggcatttttgcagaaagtcggttttatgcagattagtttaccaattggtgagttgaaagaacagatgaagcgatttaaagcattacaaaaatcagcgttttatgaatttgcaagtcagaataaaaattatcaaaatctaaagagaaatcaggatttgctattatttaatgatataagtgaggaaaattttaagaaatttaagaatgagagaagtgcgcaaggaaaaagaaagcatttccaatattctttttctaattacaaaagattttgtgaacttcataaaaagattgctgtagaatttggtaagattaacgcagaaattaaagcgttagaaaaagagaaaattgacgcggaaaagctcaaatcttgggcagtacttatagggcacaggaatcaaaagtacttaatgcttattccgcgaaattctttaggtaatttagcgaaagcgaagaagtatattgattcattacaaaatgattccagtggcgagtggaaaatttttgcgattgaatcccttactttgcgtgctttggataaactttgttttggatttgataaaaacacctttatgggcacacagtcacttgtttataaggagcttcaacaaaaatatcaacaattttttgataaagacaaacttaaacgaaaagatcagttttcagaaaatggaaaagaattgattgaattttatcaggcggtattgtctctggatgctacaaaatcagcattagcgatacaaaaatttgacgggttggcggaaattcttcaaaaaaattatgaaaataaagaagagtttgaaaaagatttgaaacaagtttgtttttataaaaaaatagttactatttccgaaaaaatgaaagatgacttgatcgcagattttcaaggttatttttataaaattaccagttatgatttggaaaaagatgatattgaagtgttagaaaattttaagaataaaagattatttgataggaataatcctgaaattcataccaaaatttggctggatttttggtcatctgataatgcaagtagtaaatatcctatccgcattaatcctgaactgaaaattagctttgtggagaaaagactcgatgatttggaagagcgagatttgggaaaattgggtaaaaatcgtagaaaggaagaacaatttttattatcaaccagcgtgactctgaatgctcatgatgaatatgtagatttggggtttaaattagatgatgaaattaagaaattttttgaagattttagcaaacaattcaatcaggggaaaaaaccatttgaacaatattattacggattagaccgtggacagaaagaattgcttacacttggattatttaaattctctgaaattgagaaagtgcgatataaaaagcatgatggcggtcaggatgaataccataaaccagaatttgttaatttagaaatttaccggatcaaggaaaacgaactaacattccaaaatgtggaaggcagatatgtctacaaaagccctgatcaattcatggataattcaaatgtaatagaaaagataaatattagttcatgtttagatttatcttgtgcaaagttgataaaaggaagaattgtattgaatggtgatatttctacctatcttgcattgaaaattacaagcgcgaagaggaagatctatgaaggagttacacataaaaaatttacttcggagcatgtgtgttttgaagataataagcaagcgttttttttaaactatgaaaatagaggagaaattaaaaatgaatatttatatttttatgatgaccgttttaactcgattatttcgcaggatcaaataaaacaagaattacaaaattatcacgatttagtgaagcaaaataaaggatatgattttatttccattgaaaaaattaatcatttacgagatgcgatttgtgcgaatgcagtaggtattttgtatcacttatatcaaagatatccaggattattggtatttgaagatttaaaaaaagcagagaaggaacaccatatatcccaattttcaggaaatttagctagtcgtatcgaatggaagattttgcaaaaatttcaatcgcttggtttggttccaccttctttaaaaaaagtaatgaatatgaacataggacagcttggttgtgttgtgtatgtgccaacaagcggaacaagtaataaatgccctcattgtggagtaagtaataccgataaaaaggaaaagtgggaatcgcatgcttatgtttgtagtaatgagaattgtggatttgattcaaaagaatcaagtaaacgacaggggcttaacgcgttgtccgattcagataaggtagctacatataatattgcaaagcgtgggcttgataaaatgatcaatttctaa

SEQ ID NO: 259 - DNA, 3108 bp, Unknown
  metagenome-derived sequence
  misc_feature (1)..(3108): Unk92 native DNA
atggcgtatcaatatgaatttacaagaacaataaggtttaatctcaagagtaaagatattgctcaatttaaaaaattttttcctgaagaagaaacagattttcagggattatttgatagttttcaaataaagtttgccgatcttttggctcaatttaaaaaggcggtattttatccaaaaaatggcgatagcttaatggtaaaaaatagtttagaaattaaaaaaatatggctaaggcaatatgctcgtgaggaattttacaatataaatgagcgccaaagaacgcataacaaatttttggctagtttattccaaaaaaatttagttgattggtttgaaaaaaataaaaaattgtttgaacgattaaaaacaattaatcaattaccgcaagattgccaattaaaaaggtcagaattgctggcattgcttaaagaaataaatagtgcagataattttctttttattaaaaattttgttcagccgggagtagcaaatgacaaaaaatctgatagcgatttagaaaacttaaaagataaagttggccgatttgaggaattgttaaataaagccctttttgtaatggcgccagatttaagccagggggtagaggtgagtcgggcgagtttgagttattatacggtaaacaaaatttctaaacgagattttgaccaagagctaaaaaataaagaagcagacttaaatgaaccatataataaaaagttaaatcaacagtttttgcaaagggttggattttttgattatttaaaagacgaataccaatgcgatattcaaaatatttctattcagagtttatatcaagcgcttaaaaattttaaagctcaaaaaaaatcagagtttatgcaagcagtgcaagagagaaagcaagcaaaagaactaattaaagattttccgttatttataccaaaagaagccaaagatatgcaaaagtttattgatatttcaaggcaaatagataataaaaattaccaaaaacaaagaagccataatgaatacgaaaaaaaacaattagctaaagaaattaaagacttaaaaattaagcgaggccaatattttcgagaaagttggggattttctaattatattaatttttgcaacaacatttttaaaccagtggcaatagacattggtaaattaaaggcacaaattagatctatcgaacaagaaaaaatagaagcacgattgcttcgatattgggcgcatatttttaaaaaaggcaacaaatattttttgttgctggtaccaaaagaaaatatgcaacaagttaaaaattttttagataatataagttcaaaacaaaatggcgaatatgcgctttatagttttaattcattaaccttaagggcgttaaaaaagcttattcgcaggaatcttggcaaagagcaagcacgtcttcgagatgaggcggtggcgttatgccaagaagttttgcggggtaaatatagcgaattgcgaaatattgattttagcggatttgaagaagatattaaagaaataagtcaaaagcattatgatagcgaagaaagttttcgtttagatttagagcgtgtggcttattgttgttttgagaaaaaattaaatgaagaaaatgttaagcaattatgtagcaattttaatgcgcttttattggaaatttctgcttatgattttgaaagaaacattgtaggcaaaatgaaagaacattccgaaatttggaaaaaattttggacagcggaaaataaaaatcaaaattttccagtgcggcttaatcctgaaattcggattttttaccatccgcaaaggcaacaagatgaccctaaaaaacaaaaaaatcgttttgctaatgaacatttaggtgtggcattcacgataacccaaaatgcagctcaaaaaaatttagatttagcgtttgtcaaagaaaaagaaatatccaaagctattaaaaaatttaatgaagaagttgttgacgaatttgttcaagaaaggggtgataatttatattattatggcattgataggggaaatcaggaattggcaactttatgcgtagtgaaattttccaaagagcaaggcgaagtaaaacttgttaatggcgaggtgcgaaaattcaatattcctgtgtctgctcccataaaattataccgtattaaagaagattgtctaaatagcaaaaaagaaataattattgacaggaggggcaataaaaaaattgttacaatgtttgaaaatccttcttattttatagacgaggaagaaaaatttgacgaaatcgaatctgcttgtattgatttaaccaccgcaaagcttattaaaaataaaatagttttaaatggtgatgtaaatacctatcttgaacttaaaaaagctaatggaaaacgacagctttatgaaaaattgtctgaaattgacgataatgcgaaaattgaattttataaagatgaaaaggagaggaggcttcaaataaagtcaaagccaaccgaaaaaaatagctatcaatatattatttattattctccagaaaatgaaaaaataatgtcgcacgagaaaatgcaaagatatttgcaggattatcttgattatttacgtgctgataatttagctaaagaatatattagcattgaaaaaattaaccatttacgagatgctattaccgctaatatggtcggaattattgcgtttttatttaaacaatatccaggaattattaaccttgaaaatttagttgaaactcattctaaaaaaaataatgaaaacatagagcgtcgtttagaatggagtttatataaaaaatttcaaaaatttggactagtgcctccccaattgcgtcaaacagtgcttcttcgtaagggcaaagaagaagataatcaatgtaaccaattaggaattattcattttgttccggagaaagatactagcgctcgttgtcctttttgcggtaacaccatgtcaatgtcagtaagaaaagaagataaatttaaataccataattttgtttgtgataaatgtggttttgatacccaaaagccaggagcaccttttaattttattaaaaattctgacgatatagccgcatataatattgccacaaaacaacttaaagacaatggatga

SEQ ID NO: 260 - DNA, 3297 bp, Unknown
  metagenome-derived sequence
  misc_feature (1)..(3297): Unk93 native DNA
atggaaaacaaatatcaaattacaaagacaattagatttaagctcgacccacagggaaatgtagatgctgttctattaaaattccaagaagatttaagtgataaattattaagggcaaagactatcgacaatccggagggtgttaatagtctaaagccattgattaataaattagaaggattaaaaaaaaatatacagaatcttatttatgcaaaagaaaagaatggtggatataaaaccaatgagaatggacgaatagtatggttctgtggtattaagataaaatatacctggatgcggagttatatgaagaacgcattctatgataataaacaagataatccacctaaagcatattcacttaacgaacttgactatgtacaaacagagtttgataatggttggtttcctgagttagatgaaattatttataatttgagatatttcgacaagacagaaactaatccaaagtacgaaaaacagcgatatgctcaaatagcattggtaattaaccaattatcaaaaaggagtaattttgaattcatgaaatcgttcgtatttgctttcactgcaacaaacaaacctgacatcgataatgatattgatgcaatcaaaagacagattgaagaaattgaaatagaactgaacaatcaaaaagcattttacttgccgtatcaaagtaatggaattcaacttgcagcaggttctttcaattattatacgattaataaatcgccaaaaatgcttggtgaggagaaatcaaagttagaaaaagagttaaaccaatcaatatatgaatctaaaggagtttttgatggagtagaaagatttcgaataagatattcattagacgaaggaattttatcgactttaaatattaaaaatgaattaccagtaaaatcgctaaatgaagcttatgattttttgaagaaatggaaagccgaacaaaagaagtcgtttatggaagccattcaagtgagtgatgacaataaagcaaaatcaataatgctgtttaaatcatcagacacagattataatacagtaaaacagcgcattcttaaagtccaagacttaggtaaaaaaataaataacagtggtttgccaattgaagagattgagaaggcgaaggtagaacttaagactcttaaaagtaagaaaaatgacttttttaatactttttcaaataatccacaaacaccgaattataagcagctatgcaccttttataaaaatgtagcaataaaacgaggcgaactaaaaaccaaaatagcatctatcgaaaaagaaaagcatatagccgagcaagttcaatattggtgtgttgttttggataagaatgaacatcaatatctttacatgattccaagagatggaactgacaatattaaaaaagcaaaagaatatattgaaaggctcaaaagtaccagcatcgagagtccaataaagttacactatttcaattcgctaactctaagcgctttgcgcaagctctgttttaaagaaaataacaatacatttactaatacaatcaaaaatgttacatttcctccatacgaacaatttcaaactgaacctgataaaataaaattctaccaaaagattttgaaaaacgcaacaacacttaatttagatatatatacaggattagacgctttatgccaaagacaatttgagactttaaatgatttcgagatagaactgaataaaatttgctacgccaaaactatttgtatttcacaagatgtcgaagtgaaactaaaagatacttttaatgctatttgctttgaaattacatcacaagatataaagcgttatcttaatgatgatattgataatgcatccgacatacacaaaaacaaacgacatacaaatacctggaggtcattttggtatcctcaaaatgaaagaaatcaatatcctacaagattgaaccctgaaattagaatagtgtggcgtgaggcaaaaccaagccgaattgaaaaatatggcaaagaaacgcctctttatgatgagaaaaaaaagaaccgttatttacatcctcagtataccttgattactacaattactgagaatgcccatagtaacaaaattaattatgcctttgctgataccaaagacaaaggtgaagcaattctcaactataatgaacaaataaataaaggtgttataaactatgcttatggtatcgatgttggagcagatgatttggctttgctaacgcatatcaataataataacaaaccggttttatttgacgcatacgaaataactaatacgaaatttgaaaaaacaggatatttaaaaggcggaattcaaagagataaagcttacaaactaatagagaatccttcttattttcttaaaaaggaattgtacgacaatactttcaatgacaagcaatttgaagaaacatttgctcaattatttaagaaagtaagcatatcctcattggacttaactacagcaaaagttatttgtggaaaattgattttaaatggagactatgctactcatcaaaaattaaaaattctacatgcaaaacgaaagataagccaacgattaaaaatcaatccttccttaaaattaattcaaggaagcgatgacttatacaaattatttattggcgaagaaataaaaggaaacatcatatatagaagcaaagaaatttatgatgtgataataccattcgaagatgttaaacaagatttctttgatttctttgacaagcagaaatctgatgatgctcggttagaagataatataaataaaacccgtgcttcattggttggaaacatggtaggtgttattgattttctttacaataaacatcccggatttattgttttagaagatttgaaacaatcgataatagagtctcatcgaaatcaatttgaaggtgatattactcggccgttagaatgggcgttgtatcgtaagtttcaatccaaaggcttggtaccgcccataagtgaattgctaaaactacgggaacttgaaaaatttacaattcaaaatgaaaaacgtcctaaaaaggataccataaagcaatttggcattataaagtttgaatcggaaagcgaaacaagtttgttatgtcctaagtgtggtaaaaaagcgtataaatcttcagaagatgagaagtataatagagataaacaacaagggatctttgaatgtggttgtgtagattgtgattttaataacaaaacaaatgcaggtgaatataccagccttgatactaacgataaaatagctgcctttaatatagccaaacgaggatttgaaaacttcaaataa

SEQ ID NO: 261 - DNA, 3525 bp, Unknown
  metagenome-derived sequence
  misc_feature (1)..(3525): Unk94 native DNA
atgcagaactacaaaatcaccaagaccattcgcttcaagttagaagctaacccagaacaaacagaagcactactcaatcaagtagaaaaatccaatcaagcgtttgaccttgtttttttcacttccaagctcaaaaacttcgctgatggcatgcgggactatctgatgtttcaaaaaggtaaagaacctgaaaaatggcaattccgaaaaaattttaccatcaaaaaagattggctgaaagtgtatgccaaagaggaattggctaacataaagcaaaagcaaaaagaggaacaagataaaaagtcgcgcaggcaacccattcaactcaatgagggcgcaaaagaaataatccaaaagtcattaggcgaggtttacgctatttatcaagagcttattcaagatgtgagcaaagagcttaatgaacgcgctcgcagagaaagaacaggtttattacttaaacgtttgcaagaaaaaaataacctccccttactctgcgacctcactgaacacataagcagtggaaacgaaactgacaactctatctatgaactccttaaagaaaaagaaatgctgcaaaaagagttattacaaggtattgcagagtttttacccgctcaatccagcggtctacctattgctaaagctacttttaactattacaccatcaacaaaaaacctacggattatgcgcaaaagattgaggaacaattaaaagaattaagtatatctgattattccaaaaaaatacaaatcaattcgaagttatttcttggcaatgataacttcaaaaaggtaatggaagatattagaaaccgtctgaaaaaagacaatattacgcatttactttttggtcatgttcctgcaagcatttcacttggttacgagtacagaagcctgcgtcagatactcaaaaacatcaaagcagaacaaaaaaagaaattcaacgaattgatgatggaagatgattttacctatgataaactgaaaaaagaacaagatttgtatttgtttacttccataaaaaaggagcaatttgatgaataccttgataaaacacgtaaaattcaggaacttgcggataaaatcaatgataaaagtctgtctaaagaagagaaagaaaatctaacttctaaaaaacaaacaatagccaaaaaacgcggtgaattattaagagataaatttatagactggaaaaaattcatggaaatctaccgtagtgtagcccaaaagcacggtaaaatacttgcttcgctcaaaggcatagaaaaggaaaaagtagaatcccaacttttgaaatactgggcattgatactcaaagtaaatgcacagtacaaacttgtgcttatccctcgtgataaagtacaagatgctaaaaaatggatagaaaatcataaaaacaataaaaaaactgatacacaagagctaccccaactatattggtttgaaagtttgactttcaaaagcctgcaaaaattatgttggggacacgcagaaacggataataatgaatttcgtaaaaatatcataagtattattccaaagaataaaaataataaaccatacacgggagaacatgaatttgaaggaaaagaacaagataaaataaacttctacaaaaaggttttgcaagataaatacacgcgtgatgtactgcatttaccctttgcacagatagataaagaaattatcagcaaaaactttgatactttagaagacttcaaaatcactttggaaaagatttgctaccgccgtcaggtaatactcaatcaagatgcagaagaaaccttaactaagcaattcaaggcacaaattctcaatattacatcattagacctgtcccgtaagtctaatgagagtgcgctcaaaccgcatacacaaatatggaaaaatttttggtcggatagcaatgaaaaacaacattttgatattcgcttaaaccctgaaattaccatcacataccgcaaacctaaacccagcagagtgcataaatacggcaaaaattctcaaaactatgatgagaaaaagaaaaatcgttacttaaaccctcaatttaccctcgttaccactatgagcgaacactgcaacgcccctcaaaaaaatctttctttcatcactgaggaagaacttaaaaaggaaatcgatacctttaatcaaaaattcagagaaaaaaaccaaattaaatttgctatcggcttggataatggagaaacagaactctctacattaggtatctttgtacctgattttaacaaaaataccaacgaagagagattagctcaactccgaaaagtacaagaatacggttttgaagcacttactataaaaaacctcaattatgcagagagagattacaatggcaaccccagaaaaatgattgacaatccttcttatttcttgaacaaatctctgtatatgagaacgttcataaaaacagaacaggagtatgaacgcatgtttgcagagcaatttgagaaaaaacacttactttctctggatttatccgctgctaaagtaatatgcggacatattgtaaccaacggagatacccgtgctttatttaacctatggatgcgccacgccgaaagattgatttattttgctaatgaccacataaaagaagaaaccgctaaaaaagtgcttattaaaaccatacaagaattgctccccgcagaaaaagagaaattagcggaaagtatctcaaaagagaaaaaatacgctaaactcagcgagcaagagaaactaagatattttacatggttatttgaggataggaaactatattcctttaatgaggaggaaaataagaaatttaatgatatattggaaagaaaaggcaactatgccataggaacagtcttttctgttacctatttaggagaagaacttgttgacgtaaaaagcgtatttgatatccgcttgatattcaaaaaacgagaggaattttactctattttatccgaagaggagattatgaaagaattgagcagatacaatactaaccgcacctcacacgacctctccaaccaagaattagaccttaaacttaaaacttacaaagaaactattgtagctaatgctatcggcgttattgactttttgtacaaacaatacaaacaacgctttggtggtgaaggtttaattgtcaaagaagattttgataccccaaaaattcaagaagatttagaaaggtttagtggtaatatataccgcatattagaacgcaaactttatcaaaaattccaaaattatggattagtacctcctattaagtctttgctctctttaagaaaccaaaaagtagcattggacagcatctttaaccttggggttgtttcttttgctaatcctgataaaacaagccaacaatgccccgtgtgtttagaaggtaaattataccacggtaaaaaatgcgataaatgcgggtttagagctactatgatgcactctaatgatggtattgcaggctataacattgctaaacgtgggtttaataattttcaatctttattacctcttaaacaatga

SEQ ID NO: 262 - DNA, 3204 bp, Unknown
  metagenome-derived sequence
  misc_feature (1)..(3204): Unk95 native DNA
atggcacataacaagccacacttggttgattttcgcaagatgtttctctcgcttacccgattatgtaatgaaactctaattccgatctgtaacgattctatctgttttcctgcattagataaacttcaggacaatgcacgccatgaagcaataaaaacatttgcatcagaagatgagagagaagaacgaaaaggactctcactttccattaaagacattaaagaatactttgaagaaaacggaggctatgttcctttaggtaaagtaacgctcaatcgatataccgctgaacaaaaaccgaataacttcaaggaagatataaagaaaaagattaacgatttaagattaaccgatttaatacagaaactcatcaacctatcggacgaagagataaaggagtactttgagtttaatggaaagcagaaaaagcaactgatagatgacacaagactctcagtggtagaaagggtacaactattcaaatacaagcctattccagcagcggttcggtttatgcttgccgaatatctgcataaaaataatctattggacaaagagcgagtaatgacgttgtttgaaataatcggcaaaccgcgcagcattggcgaggagtatacaaagctgaaagatacaagtgatttcgatttgttccaatatccgttaaaaccagcttttgactatgcatgggagaatgttgcccgcaatttgagaaacgataaagccaatgcatatcccaaagagcaatgcattcgattcttggaaaatatatttgaggtatcaacatcaacaactgcatttatactatatgccgacttgttatttataaaggacaatttatcaacactggaacatgagaaaaacagtcccaaggataaagatcagtttattgaaaacattaaaagaacatttaaaaatataaactacggaatagaacaaaaggaatacattaaacatcaacaaacgatactggattggataaataaaaaagaagacgcccagaaagaacttaaaaatgcaaatgacaattcatataaaaattacgagaatgccaaacagcaatttgggttattgagaggcaggcagaaaaatagcatacgacaatacaaagacctcacggaaacctttaaaactttagctgtcagctttggaaagaactttgctgaattacgagagaagctccgtgaagaaaatgagattaacaaaatcactcattttggaattatagtagaagatagcaagttagagcgatatgttttacttagcaaactggatgaggacaagacattatctattgaccatctattaattgatgagccaaaaggcgaattaaaaagctatcaggtgaaatcattgatgcctaaatcactggaaaaaattataaagaataaaggtggatacaaagattttcatacttcatcaaaatacataaattttattgagatgaaaagagattgggctaattacaaaaataagccagaactggtggattatgtaaaagattgcctccaacattctaccatgtcaaaagatcagcattgggcagcattcgggtgtgattttacgacatgtaattcgtatgaagccatagaacgagaacttgaaataaaagcatatcgattaaaagcctcacatatttctattaccacagtacaaaaactggttaatgaagaaaattgtattttacttccgtttgtaaatcaagacatcacttcagcaaaacgagaattaaaaaaccagtttagcaaagattgggatatgctttttgagaataacaatgattaccgattacatcctgagtttagaattgtgtatcgacaacccacacctgattacccattaaacaaacgctattctcgttttcaattaattgctcatttaatgtgtgaatacattcctcaatcagttgaatatatttcacgtaaacagcaaatacaaatattcaacgataagaatgaacaaaaaaaacaagtagatgcttttaatgaaagagtaaagccatcgggagaatattatgtattgggcattgatcgcgggttgaagcaattggccacgctgtgtgtgctgaataatgagggacaaatacaaggcggttttgaagtgtttaccagaacattcgattccgtaaaacaagaatggaaacacaacttattggagaaacgagctatcttggatttgtctaatttgagggttgaaaccaccgtcaatggtgataaagtattggtcgatttagcttcaattttggtaaaagacgaacaacacaattacactaaagacaatcagcagaaaataaaacttaaacaacttgcatatatccgcaaattacaatttcagatgcaacatgaaccccaaaaggtattgaattttataaaggattacacaacaccacaggctgtaggagaaaaaatcggcgaactgattactccttataaagaaggaactcattatgatgatttgccaattgagaaaatctatgacatgttgcaacaattccaccaatttacagatgaaggaaatgagacagctaaaaaggaattgacagaacttgactctgccgatgacttgaaaaccggggtagttgctaatatggtaggtgtgatagcctttatgctggaaaaatatcattataatgcttttgtatcactcgaaaacctttgccgtgccttcggttttgctaaagacggattaaatggcgaactattggtgagtacagctgtagataatactgtagattttaaagatcaggagaatttggtattagcaggcttaggtacttatcattactttgaaatgcagttgctcaagaagctgttccgtattcaaacaggaaatgacataattcatttggtacctgcattccgcagtgtggataattacgaaaccattcgcaaactttcaaccaaaaccaaagatgcactatatacttgtaaaccatttggtgtagttcatttcattgacccaatgtacacctcaaagaaatgtcctgcttgtgacagtattaatgttagtcgcttctcaaaacaaggtgatattatttcttgtaataagtgcggtttccaaacgagatgggatacacaaaccacattaaagaacaatgcattattacagtcttataagaagcaaaatcttaacttacactatatactcaacggtgatgataacggagcatatcgcattgcattgaaaacatttgcaaacctaacataa

SEQ ID NO: 263 - DNA, 3201 bp, Unknown
  metagenome-derived sequence
  misc_feature (1)..(3201): Unk96 native DNA
atggaaaaatataaaataaccagatgtatacgattcaaaatagagccggataaagaacatttacaaaaaatcttcagcatagtaacaaatttgaatcgatcaaaagaaaacaaaaaatcaaatcttctattgctgattcagcgatgtttggaattgccaaaacttttgtctgattatattatggccggagattcacataagttgaaatcaaatgtaaaagtaaattacaggtggcttcgtatttatacaaaagagcagtattactgctggaaaaaagataactttgaaaagaggataagaatatgcgatataaattaccttaatgaaatattcaagaattttttcaaggagtgggaaacagtaattgcaagattgacggatgactgtaacaggcctgatgaggcaaaagtgagggattcctacattgcgctttctgtgaaaaaactttgttcaagaagcatgttttcctttataaaagaattcgttgaaaacacttatcccaaagataccgaagatgtaaaaaatagttttgtagctttacttgaagaaataaataaaactctgaaacaagccgaatatgattatcttccttcgcagtcttcgggacttgtaattgccagagccagtttaaattattacactgtcaataaaaagcaaaaaaactatcctatagaaatagatgaaatagaaaagaaacttaaatcaaagtttttctttaataaaaatcagttttttaatgatttaaatataggcgattactgcgatttttcgcttgatgaattatatccaaagcttaaagaatataaatcgaaagaaaaatcgaagtttttggaagcagtatcccaaaaaattgtatttaatgaaataaaaactaaatttccattatttaaaattgatgagcatgaatttaacgaatttgtcaaaatttcggaagatataattaaaaaaagtactttaagaaattctatgcagaaaggaagcataaacgctgaaaatattaaaaaaggaataaaaaaacttaaacaattacgaagtgattattttagggcaaaagacaataaaaaaaactgcaatacaaaacaacaatttaaagaatatttaaaattttgcgaaatatataaaaaaattgccaaagaaagaggccgactaaaagcccaaataaaaggcattgaaaaagagcgcttggattctcagcagttaacatattgggcattaatacttgaaaaaggcaacgcccattatcttatccttattcccaaagaaaacgctcaggctgtttataataaattacttaagtcaggagaatcgtcaggtaatgaatctactgcattgtattattttgaaagtttgacatatcgtgcattacgtaaactatgctttggaatgaatggtaacacatttttaccagaaatccagaaagagttacctcgatataatcagcaggatttcggagaattccgttttaatataagcaaagactgttcccaaaaaaatgaacctgaattaatagctttttatcaggatatattgaaaaccgactatgtaaagaaaaatatggcattgccgcaggatgtatttgacgaggttgctgttaagtcttatgctaccctacaagatttttccatagctttagaaaaatgctgctatactaagaaacgaatcatttccgaagccttaaaaaaagagatccttgaaggatctgatgcccagatatttcaaattacaagccttgaccttagaagacaagagaagataaatcttaaagaccatactgaattgtggaaaaaattttggtcttctgaaaatgaacaaaacaattacaatacccggttaaaccctgaaatctccatagtgtggcgtgatgcaaaaaaaacacgaatagacaaatatggcaaagatactgatttgtatgatccgaagatgcataacagatttctgcatgagcaatatacgctttgtaccacaatatcggagaattcagtgagcaatgaaattgtttttactttcaaggacagggataaaaaagaattcgaaataaaaaaattcaacgaaaaaataaatatatacatgaggggaaaaagatcagcagacaatctatggttctatggaatagacactgggctgatagaattcgcaactttggcagtgatcggcaacaaaaaagaattgcgccccttcagtgtttatgaagtaaaagaccttacatacaacaagaaagggtatgtatataatgaaaaacatgaacctgtattacgggaaaaaccctacatggcgatacagaacctttcttatttcttgaatgaagatctttacaataagactttcagagacgggaaattcgacgaaactttcaatgacttgtttgaaaagaagcaaactgcggcaattgatttgacaacagcaaaattgattaacggcaaaataataatcaatggcgacatatctactttgctgaatctgaaaatattgaatgcaaaaagaaaaatataccaaagcctcattaaaaatccgcacgttttattgtttaaaaataatgaagatgcatataaactttttattacagatgaaaaagatgcaatttaccaaagcaggatagagttcaattttattaagcctcatgaagaaattataaatgagcttaataaatattttgcggatcagcagaaaaatgaagcaagaatcgaggagcagatcaataattttagaagaacacttgccggaaatatggtcggagtaatttatcatttatacatgcagtatccgggaataatttcaattgaaaatttatcgcattcaaatattgaaggaaaaaggcgcggttttgaagggttagttgaaaggcctctggagttggtattgtacagaaaattccaacatgacggtcttgttccgcctataagcgaccttctgaatatcagaggtagttttgatgagaaaaaaaataagaatggcttgacacaattaggaataattgcattcgttgatgagagtgaaacgagcctgcgatgtccagagtgcaatgaaaaggcatatccaagaagtgattctgaggaatataagagtgataagagaaataaggtttttaaatgtaaaatgtgtggctttgataacaaggaaaatccaatggggtatgccggactcgacagtaacgacaagattgccgctgtaaatatagcaaaaaaaggtatgaatttgttatag

SEQ ID NO: 264 - DNA, 3714 bp, Unknown
  metagenome-derived sequence
  misc_feature (1)..(3714): Unk97 native DNA
atggaaacaattgaatatcaattttcaaagacattacgatttggccttacactcaaagaccatgaaagaaaaaacaaaactcatcaaacgttcaatgacctgataggtgtttcagcccaacggattaaagaagatgcgtcaagagatcatgataaaacagaacagcaattagtcacatctgtcgctgcttgtgtgaaactgatgcaccaataccttgatgcatgggaaaagatttatcgtagaaccgaccaactcgctctaaccaaagatttctacaaacaaatggcaaagaaagcgtgctttgatgcatattggttagataataaagagcggaaacaaccacaatcacaaatcattgccatttcgtctctaagaaaaaaacatgatgaaaaagaacgaaaagattatattctcgactattgggctgataatattagtattacaaaacaaagaatacacgaatttgaaaaagtaatagaccaatttaaaaaggcattagagaacaaaagtatggcacataacaagccacacttggttgattttcgcaagatgtttctctcgcttacccgattatgtaatgaaactctaattccgatctgtaacgattctatctgttttcctgcattagataaacttcaggacaatgcacgccatgaagcaataaaaacatttgcatcagaagatgagagagaagaacgaaaaggactctcactttccattaaagacattaaagaatactttgaagaaaacggaggctatgttcctttaggtaaagtaacgctcaatcgatataccgctgaacaaaaaccgaataacttcaaggaagatataaagaaaaagattaacgatttaagattaaccgatttaatacagaaactcatcaacctatcggacgaagagataaaggagtactttgagtttaatggaaagcagaaaaagcaactgatagatgacacaagactctcagtggtagaaagggtacaactattcaaatacaagcctattccagcagcggttcggtttatgcttgccgaatatctgcataaaaataatctattggacaaagagcgagtaatgacgttgtttgaaataatcggcaaaccgcgcagcattggcgaggagtatacaaagctgaaagatacaagtgatttcgatttgttccaatatccgttaaaaccagcttttgactatgcatgggagaatgttgcccgcaatttgagaaacgataaagccaatgcatatcccaaagagcaatgcattcgattcttggaaaatatatttgaggtatcaacatcaacaactgcatttatactatatgccgacttgttatttataaaggacaatttatcaacactggaacatgagaaaaacagtcccaaggataaagatcagtttattgaaaacattaaaagaacatttaaaaatataaactacggaatagaacaaaaggaatacattaaacatcaacaaacgatactggattggataaataaaaaagaagacgcccagaaagaacttaaaaatgcaaatgacaattcatataaaaattacgagaatgccaaacagcaatttgggttattgagaggcaggcagaaaaatagcatacgacaatacaaagacctcacggaaacctttaaaactttagctgtcagctttggaaagaactttgctgaattacgagagaagctccgtgaagaaaatgagattaacaaaatcactcattttggaattatagtagaagatagcaagttagagcgatatgttttacttagcaaactggatgaggacaagacattatctattgaccatctattaattgatgagccaaaaggcgaattaaaaagctatcaggtgaaatcattgatgcctaaatcactggaaaaaattataaagaataaaggtggatacaaagattttcatacttcatcaaaatacataaattttattgagatgaaaagagattgggctaattacaaaaataagccagaactggtggattatgtaaaagattgcctccaacattctaccatgtcaaaagatcagcattgggcagcattcgggtgtgattttacgacatgtaattcgtatgaagccatagaacgagaacttgaaataaaagcatatcgattaaaagcctcacatatttctattaccacagtacaaaaactggttaatgaagaaaattgtattttacttccgtttgtaaatcaagacatcacttcagcaaaacgagaattaaaaaaccagtttagcaaagattgggatatgctttttgagaataacaatgattaccgattacatcctgagtttagaattgtgtatcgacaacccacacctgattacccattaaacaaacgctattctcgttttcaattaattgctcatttaatgtgtgaatacattcctcaatcagttgaatatatttcacgtaaacagcaaatacaaatattcaacgataagaatgaacaaaaaaaacaagtagatgcttttaatgaaagagtaaagccatcgggagaatattatgtattgggcattgatcgcgggttgaagcaattggccacgctgtgtgtgctgaataatgagggacaaatacaaggcggttttgaagtgtttaccagaacattcgattccgtaaaacaagaatggaaacacaacttattggagaaacgagctatcttggatttgtctaatttgagggttgaaaccaccgtcaatggtgataaagtattggtcgatttagcttcaattttggtaaaagacgaacaacacaattacactaaagacaatcagcagaaaataaaacttaaacaacttgcatatatccgcaaattacaatttcagatgcaacatgaaccccaaaaggtattgaattttataaaggattacacaacaccacaggctgtaggagaaaaaatcggcgaactgattactccttataaagaaggaactcattatgatgatttgccaattgagaaaatctatgacatgttgcaacaattccaccaatttacagatgaaggaaatgagacagctaaaaaggaattgacagaacttgactctgccgatgacttgaaaaccggggtagttgctaatatggtaggtgtgatagcctttatgctggaaaaatatcattataatgcttttgtatcactcgaaaacctttgccgtgccttcggttttgctaaagacggattaaatggcgaactattggtgagtacagctgtagataatactgtagattttaaagatcaggagaatttggtattagcaggcttaggtacttatcattactttgaaatgcagttgctcaagaagctgttccgtattcaaacaggaaatgacataattcatttggtacctgcattccgcagtgtggataattacgaaaccattcgcaaactttcaaccaaaaccaaagatgcactatatacttgtaaaccatttggtgtagttcatttcattgacccaatgtacacctcaaagaaatgtcctgcttgtgacagtattaatgttagtcgcttctcaaaacaaggtgatattatttcttgtaataagtgcggtttccaaacgagatgggatacacaaaccacattaaagaacaatgcattattacagtcttataagaagcaaaatcttaacttacactatatactcaacggtgatgataacggagcatatcgcattgcattgaaaacatttgcaaacctaacataa

SEQ ID NO: 265 - DNA, 3480 bp, Unknown
  metagenome-derived sequence
  misc_feature (1)..(3480): Unk98 native DNA
atgcaagagcttttgccttgcaaaatttttttacaaacccataggaaaacaaacatggaaaaataccaaattactaagtcaataagatttaagttagagccagttaaggctagtcagtttgaaaaagaagtagaaaaccttaaaaatgcaaaagaggaagaaaaaaatctttctcttttagtttctactgcacaagatttatctaaactactcaaggagtatatttacacagatccgaatcacgaaaagaagaagttcaaaagtactgttacagtacattaccgatggctacgtgaatttactaaggataaatatttcgaattgagaatggaaagtccaacagaagaaccagaaaagaaagccactggtcattttgctagtttagcttctaggctaccacaaaaaactaagaaattaatttcccaagaaaagcaatttaagctttatgaggtaaaatatttgcccaaagtgtttgaagactttttcaaaggttgggataaaaatattcaagacctctccaatatagtttccagacccaaagaatctctcactcgaaagtcagaaattgggaaagttgttttaaaatttacagaaagaaatatgcttttatttttagagcattttatttttgaaagtaaagagaaagactctagtcatctagaattccaacttaaagatagacttaaagagtttaaagaagttttagaaaaagtccaaaagtgggcaatgccttctcaatctacgggatttgaattagcaaaagcaagttttaattattatactataaataagaaccctaaagattttgagaaagagaagaaagagattgaggaaaaactttttaattacataaatgacagttctaaatctatcttatctcaaaaaaacttacttaaaagtctaggtatagttaaaaaagaaaaagaagacacgaaatattattttctatatgaaatcaatgagcaaggaattttacaaaaaacaaaacaaggaagctatgtaacattagatttgctttataaaattttaaaaacttataaagcaaagcaaaaacaggaatttaaagctgcaatggataaaaatccaagctatgaagatgtaataaaaatttataatctttttgcacctattgatccaaacaaaaatcaagataatttaaatgtatttaacaagtataaagaattgacaaaagaaattcaaaagattggcaatgatattaacaaagtacaaaaagactctttggaccataaaaggttgaatgataaactcagtaaccttaaacaacaaagaggaaaactctttttcaaaggttcaagcaaaaaaaataaccaagagccaaaagagtattttgagagattcgtagaattttgtaaagtctacagagaggtcgcgatgaaacgaggtcgtctcattgcccgtctgaaaggaattgagaaagaaaaaattgactcacaacgtttacaatactgggcttttcttgtagaagataaaacgggacaccaagtagttcttattcctaaagcacaagcaaagaaagcttatcaaaaaatttcttgttttggagaaactcaaactggctctcctgctgtgtattattttgaatcactgacttatagggctttaaaaaaattatgttttaaaatccaggacaatacctttcaagaaggaattttaaatgaccaattgatccaaaaaaactggaaaacttattttcaagatatatttgataaaaaccccaatagtgataaacgaattggagagcatcttttcaagaaagaaaatggagaaagagatgaggaaaagttaattgcattttataaagatatacttcgctgtgattacgttactaaaaatagagaagatggaaaaattgtcttacctaattccctaaaaaaagaagttctagaaacagattttaatacagaacaagaattccgtatagcactagaaaaatgttgttatttacgaaaaagaattgtcccaaaagatgagttacaaaaaattctttctgagtgtgatgcacaaattttttctattacaagttatgatttacaaaaagtagataaatcaaatctaaaagcacatactaaactttggttagatttttggaaaaaagaaaatgaacaacagagatttcccattcgactaaatcccgaaataaaaattttttggcgagaaccaaaagctactagaatcgcaaagtatggtaaaggaacagaactttatgacgaaagaaaaaagaatcgttacttatatccacaatataccttagttacttcgtttctagaaaatgctctacagtcggaaataaattatcgtttcttagatgtagaaaaaaagaaagaaaatataaatgaatttaataataaagtcaatacatttctgaaatctaaaacagaactttggttgtatggaattgatacgggaattgtggaattggctagtttgtgcttaattaaaaaagataaaactccacaaatgtttgaagttcttaaagtaaaagaagaatatctaaattatgaaaagactggcttcttacaaaaaggaactcccaagccatacaaagctattcaaaatctttcttattttttaaataaagaactctataaacaaactttcttagatgataaattcgaggaagagtttgataaaatttttgaagttaagcaagtgccggcattagacttgagtgtagcaaaagttatttctggtagaattgtaatcaatggagatattccagcaagattaaacttaagtttatccaatgcacgtaggaaaattatagaagccttaattcaaaatccatctgttcaactgagtgaggaaaattataaaataaaaattgcaaatgaaattatttttagaggaagaaaacagtttaatgaaattaaatcatgggatgagattaaaaatacattaaataaatttttccagaaagacaaagacaatcctgctaaagtgcaagaagatataaataaacatcgaaaagtaattgctgcaaacataactggagtcattcatttcctctataaaaaatttccaggtataattacaattgaatatttagatcaaaacaaagttgaatcacatcgaaaagattttgaaggaattgtagacaatcctgtcgaaaaagccttatatcgaaaatttcaaacagaaggacttgtgcccccagttagtgaactttggagtataaaaacaaaagattcacaaataggaatcatctactatgcggactcagatgataaagaaaaaggaggacatgggcttagatgtcctaaatgtgagaaaaaggcttatagtaattcaaatgatgataagtataaatctgataaacaaaacaaaattttcgaatgtaaacattgtggatacgataaccataaaaatcctatgggcttagatggtcttgactccaacgacaaagttgccgcatacaacatcgctaagcgtggattggaaattataaacaaaaaaacgtaa

SEQ ID NO: 266 - DNA, 3627 bp, Unknown
  metagenome-derived sequence
  misc_feature (1)..(3627): Unk99 native DNA
atggaaaattacaaattaaccaaagcaatccgctttcgtttagaacccaatgaagggagcaacttgatacaacaacaagttgaggatatgaagaacatttcttttgatttggtatcctttatttccgggttgggcaatttcaacgatttgttgaaacgctatttgctacgagcacgaaaagatggattgattaaaatgaacagcagcctgtctataaaaagcggatggctgaagcgatatgctaaacaaatctttcatgacagcgaagcgttaagagataaaactagaaggaagcaaaccaaaacaattggagattttgaaggcttgtctgcggagattgaaggccgcttggagacataccttgctatctatcaatccttggtaaatgatggtgtagctgcattgaatgaacgagctagaaaagctaataccggccttttgctaaagcaactcggcaaccaaaatggactgtcttatttcgtggggctgatagaagcatcggtggataaaagagaagtagatgatttaagtactcaactcaagaaacagggaaaggctttacaggaggagctattagcaggtattcaaaaatatttacctgaacaatctactggttttcctcttgctaaagctagtttcaactattatacgattaataaaaagccggtggactatgctcaaaaaataagagagcaggaaggcaagttgcgcattacagattgggatgcacaagtatggagtaatagcggtttatcaaatgcaattaaggctgctgtgcagtggggaataacggatttggggagtcttcgtcaaaagcttaagaacataaaagctcagcaaaaggcaagttttaatgaattgatgacgcaagacttgaacttccaagagctaagagaaaatgcggatttatatctctttagcaacattacggaacatgagttcaaccagtataaaaatctaacagaaaaaattgaggataaggctacacgaatcaatcagtcaagtaatgataacgacaagcggcagctccgaagcgatttgcaaaagctgaagaaagacagaggagctttgattaatgcggctgacaaaagaaatcaaaatagttttaagacttacaaatattttgcaaattactaccggaatattgctttaaagcacggtcgcatcctctccactattaaaggaattgagaaggaagcagtagagtctcaattgctacagtattggtctttagttctagaacaaaagggtaagcatcaactcttacttattccaaagcaaaaggcggctgagtgttatcaattcgtcagtgcggcatcagctatccagcagtcatccaccagcaaaatctattggtttgagagtttcacgcttcgtagcctgcggaagctttgctttggctacttagatgccggaactaatacgtttaatcagaatattcaagagattttgaggcgacatcaatactccgaaatggataatcgggggcgtcaaaatcaagtgcgtattgaaggcgaattttcctttaagggaaatacccagaaaattattgcatgctacaaagacgttttagcttccagatacacacaatcggttttgagactacctgtccgacagctaagggatgaagtgattgagccaaattttgaaactttggatgatttccaaatcgcattagagcgaatttgctacaaacgctatgccttgctttcagagcaaaatctagacacaataacgcggcgttatcaagcccaagtatttgccattacctcggctgatttagaaaagggaaatgatggtaatgataaggctcatactcaaatatggaagaaattttgggcacaagaaaatgagcaaacatattttgatgtacgcatcaacccggaactgtctatccagtggcgccctgcaaaagaaagccgtgtgcacaaatacggtagagattctgcactgtatgatgaacagaaaaacaatcgctacctacacccacaatttacccttgtgaccaccatttcagagcatagcaatacgcctaccaaagtgctatcttttatgaccgacgaggagtttaaaatctcagtggatgcctttaatagcaaattcaataatgctgattttaaatttgccttgggtctagataatggcgaaacagaactggctacactgggtgtttatctgcccgcctttaaacaagaaagtaacgaagctagcatagcagaaattagaaaaatagaagcgtacggttttaaggtgctcagcattacagaccttacccatcaggaaaaagataccaatggaaaggaacgaaaaataatccaaaatccgtcctacttcttggtaaaggagcagtatatgaagacgttcggaaagacggaagcggagtatgcagctatgttctctaaattatttaaagagtcccaactcctaacgttggatttaactaccgccaaagttattaaaggtcacatcatcaccaatggcgatgtacccagcttctttaatctttggatgcgacatgcccaacgcctactctgggatatgaatgaccatgctcaaaaacagaccgcaaagcatctgagactgaaaagaagtgagcatctgaatgataaggagaaagaaaagttcattgaatatttgaatagtgtaagagtaaacaaggaatttcagaaactaaacgcagaagagaaatcacaatacacacaatggatttatgcattatggaatcgggaggcacacagtttttcaaaggagcaagtagcaaagtttgcgaaggtaaagaaagaccaacgagtggggtactattcaaaatatatcattttagccgtttgttatattggtgaagatttgcaatctgccactgaaatttttgacgtgcgcaatattttcaaactaagaaaagatttttatgcactcaaatcggagcaagaaattatacaagatttaaacacctataacactaccgaaagccgacagcaaattggcaatgaagagttagatcttaaaattaaccatctgcgggaagcagttgtgtcaaatgcagtgggtgtggtagattctctatacaaacaatacaaagaaaaaacaggtggtgagggattaatcattaaggaaggatttgataccaataaaaccaaagaagatttagaaaaatttagcggcaatatttaccgaattttagaacgaaaattatatcaaaaatttcaaaactatggcttagttcctcctataaaaagtttaatggcagtgcgtagtgaaggaataaaaaataataaaggagccatattgagattaggaaatattggttttattgaccctgaagaaaccagtcaaaattgcccggtttgtgcaacaaaatttggccatcatcaggatgtgtttgtttgtcaaacttgcagctttacaccagagaaaataatgcattccaacgatggtgttgcaggatacaatatagcaaagggaggatttaataactttttaaacccagcacctttgattaaaaaagaagaacagaaagctgctaattcaaacacaaaacaatattctaataaaaacaacacaccccgacaaaaaacagcaatggaaattttgttagaaaaagcaggattaaaaaacaaaaataatgagtaa

SEQ ID NO: 267 - DNA, 3477 bp, Unknown
  metagenome-derived sequence
  misc_feature (1)..(3477): Unk100 native DNA
atggaaaattacaaattaaccaaagcaattcgctttaagctaatacctaaaagcgacaatattctaacacctgaatttagtgataagtttaatcttattgctttcgtttctgaattaaacaattttttggatgcaacagaaaagtatttgttttatcaaaaaaatggtaattcttatttaaacgataaattgacggtaaaaaatgaatttttaaaaacctatgctaaacaggaattggcggaatataaagaaagattaaaacgaaatagaaatcaaaataatagaagacaagtgttgactattgctgattatggatacttagaggaaaagataaatattgtttttgatgaagtaaatgaaatctatagtaaccttgttgatgatgccggtgcagaccttaatgtaagagccaaacatgaaagaacagggttgttacttaaacgtttacaatccaaattgccatttttaaaatcgcttattgaaaacacttcggataaaaatgaaactagtaatttaagtttgttacttaaaaaacaagtagataaacttagtaatgaattattattaggtattgaggcatttttacctcaacaatcaagtggacttcctattgcaaaagcaagctttaattattataccatcaacaaaaaagaaggtgattttgcaaataagataaaggaatcaaaagaagaattaaccattgacaatatagatagaataaatttaaaatcttacttcaacaaaagagcaggtattcatgaaaagaattttcaaaataacctttggaatctaattaaagcagatatagaaacagctaaagaaaacaatactttgcttttaggcgatgcacctatgttgaatattgacaactatgcgtgtttacgccaaatgctcaaaaatattaaagccgagcaaaaaaagcagtttaatgagttaatgcaaaatgaggaatcttatagtgatttgaaaaacagcaatctatatctttttaagggtattacagaacagcaatttaacgagtacgccgataagacggaagaattagaagagattggaacagaattaagcaatcaaaatctaaatgaaaatagaagaaaacagttacaaggacagaaacaagcaaagtcaaaagaaagaggtaatttattaaaagataaatttagtgattggaaaaactttgccaatttttacaggcaaatttctcaaaaacacggtaaaatattagcaagtttaaagggaattgaaaaggaacaagcagaagctaaattgttgcaattttggtcattgatattagaaaaagatggcaaacatcaattggtgcttattccaaaaacgaaagcacaagattgtaaagaatggttagaacaaaatagtcaaagtagtcaaggtgcaagtgttgtgtggtttgaaagttttacctatcgcagtttacagaaactatgttttggatttgcagagaatggcaataatgagttcaatcaaaatattagaaatttattaccaagagacgaaagagggaatgtgcaaaatggagaatttgcttttcaaggagatgagcaaaggaaaataaagttctataaaaatgtgctgagtagtcaatatgcaaactcagttttaaaacttccaaaggagcaactaaaaaaggaagtattagatattacgtttgacaacttagatgattttaaaatagcattggaaaagatctgctatcaacgatttgtgaaagttggaaatgatatagaacaaaaactaaaagaatgggatgcgcaaatttttgaactgaacaattatgattttgaaaaacaagaccaaagtaatctaaaaaatcacactcaaatttggaaagaattttggacagaggaaaacaaaaacaacaactatgatattcgtttaaatccagaaattaccattacctatcgtcagcccaaagatagtagaatacataaatatggaaaagagagcggacgatatgacaaaaacaaaagtaaccgttatttacacccacaatacacactgattactaccatttctgaacactccaattctcctactaaagtattggcatttatggcagaaggagagtttgggaaatctattgatgactttaatgctaaaaccaataaagatactgtaaaatttgctgttggaatagacaatggagaagtagagctttctaccttgggtgtttatcttcctcattttaataaaacaacaaatgaagagaaagtaaaagaattaaatgctgaaaaatacggctttgaagtgttgaccataaaagatttaaactattcagaaatagactataacggcaataaacgtaagataattcaaaacccatcttattttcttaaaaaagaaaattatatcaaaacctttaacaaaacagaggaagaatactatcacctatttaatacattatttgaaaggaaaaagacactatcacttgatttaaccaccgcaaaagtaattagtggatatattgtaaccaacggtgatgtgcctgctttatttaacttatggctcaaacatgctcagcgaaatatttttgcgatgaacgaccatgtaaaaaatgaaacggacagaagggtatttctaaaaaataaattagaattggataaggaaaaacaaaagtttgctgagtatatatcaagtgaagaaaagtttagtaaattaacagatgaagaaaaacagaaatacgctcaatggatttttgaagatagagccactttaaatattacagaaaaagaggaaaataaatttaaaaaggcacaaagtaaaaaaggaaatttcacttctgatattttatttgctgtttgcaaaaatggaagcgaaacccagtctgttaccgatatttttgatgttcgtaatatctttaaaaaacgtgaagaattttatgccctaaaatcacaagaagaaattatacaaacattaaatgattacaataccaacagaacaagtcatgatatttctaccgaagaattagattttaaattggtaactcaaaaacaagttgtggttggcaatgtagttggtgtagttgattttctttacaaagaatataaagaacgttttggaggcgaaggtattattgcaaaagaaggatttgatacacaaaaaaccgaactggatagggataaattctcaggcaatatttatcgtcttttggaaaggaaattatatcaaaaatttcagaattatggcttagtgccacccatcaaaaatttgttggaagtacgagcagatggaattaaaaataataaagaagctgttttaaggttaggaaatatagcatttgtagatccttcaggaaccagtcaggaatgtcctatttgtgttacaggaaaattaagccatactacaatctgtcctaaaaactgtggctttgatagtaaagatgtttttcacactaatgatggtattgctggatacaacatcgccaaacgtggttatattaacttcaaaaatgaaaaaagataa

SEQ ID NO: 268 - DNA, 3234 bp, Unknown
  metagenome-derived sequence
  misc_feature (1)..(3234): Unk101 native DNA
atggaaaatttagaaaatgaatatcaaatcacaaagactattaggttcaagttaataccgcaacaagatataaacaatccatataagaataacaatgcggcaaaagatgtttctaacttaatttccaaaacacaaaatactttaattttattaaaagatattctttatgctaaagataaaaatggagggttcatatttaaaaaagataattctaataagtggagaggcgatattaaaattaaatacacttggatgcgcaattttatgaaaacggctttttatgccaataaagaagaaaaccctcccaaacattataaattggcagatttggaatatgttcagaacgaatttgataaacgctggtttattgaaatgcaggaaatcattgataagctgaaagattttcaaaaaagcatggaaaataatgaaaaagaaatgcaaagagattcgcaagccgctttaataataagtcagcttgccaagcgaaataattttgaatttattaaaggttttgttttggcattatgtgctacaaataaaccggaaacagataagcttattgataatttaaaaaaagctataagtgaattggaaaaggaactgaatatacaaaaagaaaattttctccccagccaaagcaaaggcgtgcaatttgcagccggttctttcaatttttatactgtcaacaaatctccaaaaatgcttggagactatttaataaaagaaaaagcaaaattaaaaagaaatttttttattgaggaagagcatcaagggaaaaagtattggaaacctagagatgaatataaagagtataacggtattattgaatatttaggattaaaaaatgaattacaatcaaaatctcttgaagaagtgtatagagaaataaaaaaatggaaagcaaaagaaaagacaaaatttatggaagcattacaagctaatgatgatgcaaaagccaaatctataaaactctttgagtcatctgacaaacattataatgaaataaaaaaccgtatattatctattcaagaattggctaataagcttaataatcctgcattatcatctgatcaaaaaataaaatataaaaataaactgaaggaaatcaaacagaaaaaaaatgatttttttaatacatttataagtaatccgcaaacaccaaagtataaaaatctgtgtaatttctatagaaaagttgcacaagaacgcggcaatagtattgctaaaattggtgctatagaaaaagataaaaatttttccgaacagttaggatattggtgtgtgattatagaaaaagaaaagcgtaaatttttatatatgattccgcgtgatgaaaaagataatatgaaaaaagccaatgactatatttcaaaacttgaaaatataactgacggcaaaagcaaattgcattattttaattcattaactttgagagctttaaaaaaactttgttttaaagaaacggataatacattcaggaaaacacttcaaggaaaagtagtttttcctcaatatgaacaggagtggaaagatgacaagaaaagacaaattaaattttatcaagatattttaagaaaccaaaaaactcttgatttgagtgcatatgaaaatgtatcggcattatgcgaaaatcagtttgaatcaatagaagattttgaaagtgaaataaataagatttgttatgcaaaaacagttcttgtctcagatgaaactgaagaaaaacttaaaaaagagttcaatgcaatatgttttgagatcacttcacaagatattgaacatagtttaaaataccctgctgacggctatcgcaataaaaaatatactgaaatatggatgtcgttttggaaagatgaaaatgaaagagataaatttccattgagattaaatcctgaaattaaaataatgtggaggcgaccgaaagcaagccgtattattaaatatggtgagaattcaaatttatatgatcaaaataagaaaaaccgttatcttcatgaacagttcacattagcaaccactattaccgacaatgctcacaatattaaaacaaatcttgcttttaaggatgtgcaagataaaggaaaagcaatcatagaatttaataaaaactatgctgtagataaattcaattatgcgattggtatagatgtaggaactaacgatttggcatgtttaagtattatcgataaaaataaaaaaccgcaaagttttgatgtatatgaaattcggcaagataaacttgattttttaaaaacaggttttttaaaagacggacaaaaacgagaaaaaccttacaggctaattcaaaatccgtcatattttttaaataaagatttatacaaaagaacttttaaagaaaagaaagaagattttaataaaacttttgatgaactgtttgaaaaaaagaaggtatctgccattgatctaacaacagcgaaagttattgccgggaaaatcattctgaacggcgatttttccgtacatcagaatttaaaaattttaaatgctaaaagaaaaataagccagacattaaaagatgatccggctgttaaaatatatgaaaaagattataaatggtatatagaaaatcaaaagaatgctatatatcatagtaaaatactttataattcatataagccatatgatgagatcaaaaaagaattatcagactttataaaaaatcagaaattagatgatgctcatttggaagataatataaacaaaacacgagcatcattagttgcaaatatggtaggcgtgattgattttttatatgagcaattcccgggatttattgttttagaaaatttatctcaatcaatcattgaatctcacagagaaaaatttgagggagatataactcgccctttggaatgggcaatatatcgcaaatttcaatcaaagtgtttagttcctccgataagtgaattgttaaagctaagagaaaaaaaaaggcttaatagcaatgaaactgaagaagaatccattcatcaattcggtattgtcaaatttataaataaaagagaaacaagcttattatgccctaaatgtggcaaaaaagcttataataactccgacgatcctaaatttaaggaagataaaaacaatacaatttttcaatgcaaagaatgtggttttcataacaagaataatgccggagaatttagtaatttagacactaatgataaaatagccgcatttaatatcgcaaaacggtgttttgaagcaaataaataa

SEQ ID NO: 269 - DNA, 3921 bp, Unknown
  metagenome-derived sequence
  misc_feature (1)..(3921): Unk102 native DNA (opal coding; TGA>Gly)
atgattaatctagaaagttttaaaaacttgtatgaagtgaggaaaacagtcagattttgattaaatcaacctagaaagaaaagtgatattaataaaacgcattgactattaaaagatttggttgagatttcttttgagagagaaaaaaaactaattaataatgaaaataatcacgtactaattgatacagagaaagttcttatagagaaattacagcaatatgtaaattgactagaaatacaactaaaaaactggaaatgaacatatcaaagatatgatttaatagctataaataaagactactataaaatattggcaagaaaagcaaaatttgatgctatgtgggagattactaaatttgataaaaaatcaaataaatatataaaagttaaacaaccccaagcaagtcaaatttctttatcatcattaaagatttgaaatagaagtgatagtattattcaatattggtgagagataattgagaaaacagattatttactcaatatttttaagcctaaattagaacaatacgagagggctattaatgatgctaatagtactcatattaaacctgatagtattgactttagaaaaatctttttacaacttttgaaactaactaaggaatttttacagcctttattggatagatcaattatttttgagttttcaaagaagaaagtttctcaagaaattgaaaagatttctgagtttgcttgagaaaaaaataatacaaaaatttataatgtattgaaaaattgagaagaacttagacaatattttgaagcaaattgatcccaagttccatattgaagagtaagtctaaactattatacagcagtacaaaaaccaaataattttgatcaagaaattaaaaaagctataaacgatttatgaataataaattttttgaagaaaagtgatagtcaaattatcgattatcttcatcaaggatcaaaacagaaaataaaattattacttacttcaaaatctccttatcctattgagttattacagttatttaaagtaaagcctattcctttttcagtaaagtataatttggcaaagttcattgagaaaaattataagaatgaaattaatttatcttatgaagagattttggataaattgaatttgttatgaagagctattgatatcgcaaatgattttaaaaattccaataatcaaaataacttttctcttgatgaataccctctcaagttagcctttgattatgcttgggaaaatacagcaagaagtttaaaaagaactatacctttcccaaaagaggtatgtaaacaatttttaaaagataattttgatgttgatgttaatgtcgataatgcagattttaaattatataccaatcttttattcatagctgataatctagcaactattgaatataataatccaaataatgaagcagaacttataaatgagataaaacaagcatttgactctatagacttttcttttgataaagaaagatattgatgatataaaaatgatgttttagtattgctaaataaggcaaaatctcaaagagactattccactatattaaaagcaaaacaagaattgtgattattgagatgatgactgaaaaataagataaaaaaatacagagatttaacacagagattaatagacaaaaaggattcacatttttgaatcgcgagttttgtaggaaaaacacttgctaaaataagagatcgactcaaggaagaaaatgaactcaataaaatttctcattacggagtaattcttgaagataaaaatcaagataaataccttcttatatcacaacttgatggaaaagatacaagagaaaaaatatctcaaaaatttggcaatggagatataaaggtgtatcaagtaaattcttttacttcaaaagcattaaataaatttatcaaaaatcctttgtcagaagatgcgaaaaaatttcactgagattttagatataaacataaagaagtttcaatatatgatgaaaaaggaaaatggacatgatatcaggaaagttttttaagtcatataaaaaagtgtttaattgactctgagatttcaagagaacaaaattgggaagcctttggttggaattttgctggttgtaatacttatgaagagatagaaaaagaagttaattctaaatgatatcagttgactgaaaactttatttcaatagggaatttagaaagcttggtaaaagatgaaggttgcttgttatttcctattattaatcaagatatttcaagtcaaaaacaagaaaataaaaacatttttactttggaccttgaaaaggtatttgagtgaaaagaatgtaggattcatccagaattttctatcttttatagaaagcccatggaagaacacaagaaggagaataaatcatgaatcataaatcgttttggaaggttacaactattagcaaatcttggtatagaatttattccaagaaactcttcttttaaaacaaaaaaagaacaaaatagaattgcgattgatcaaaagaaacaaaatcagttagtgcaagagtttaaccaagaaaaagtaaatacatattttgaaggattagataattattatatttttgggatagatagatgaatcaaacaactagcaactttgtgtatcacaaataaaaattgagttatacaagattttgatatttatacaaagcactttaatagtgaaagtaaaaaatgggaatacaaatttcatagaaaagattgaatattagatttaactaaccttaagattgagtctgataaaagttgaaataaatatatagtagatatatctttatttcaagctaaagatgaagattgaaatcctaccggcacaaataaacaaaatatccaacttaagcaacttgcatatatcagaaaattacaatatcaaatgtctgcaaatgaagaatgagttttaagttttttggaaaaatataagaacaaagaggaaagagaacaaaatatgaaagaactaattactccatataaagaatgaaaaaattttgcagatttaccaatggatatttttcaagaaatgtttgaaaattattatagattaaaaactgatcaaaatttgtctgaatctgagaagaaaaatcttatgaagatcactacagagcttgatgcaagtgaaagcttgaaaaaatgagtagtcgcaaatatgataggagtgatttattatttgatgaaaaaatatgaatataaagtgaagatttctcttgaagatctttcaaatgcttggtttttttcaaaagacggactttcttgagatgttgtgctaaatacgaaaaatgatgaaacaatggatttaaagaaacaagataatttagcgcttgcttgagtgtgaacatatcatttctttgagatgcaattgttgaagaagttatttaaaatttctaccgaagaatgaattttgcatttagtcccaagttttggaagtgtaaaaaattacacagagatttttaaggataaggggaaatatgtatataaacagtttggtattgtttatttcgttgatccaagaaatacaagtaaaaaatgtcctgtttgtttaaatacacaaacgacttgaaaaaaagaatgaattccaattataaatagaaattacaaaaaatctaatatattttattgtgaaagatgttgatttcaatcaatacacagtcattgccaagaagaaaatattaaagatagtaatggttttcattattctgtagaagaagtagagagaatagagatgaaaaataaagaagcaatagaaaaatataaaaaacaatgaaaaaatcttcattttataaaaaattgagatgataatggagcatataatatttgagagaagataagagaacttccaaaaaaatcagatgtaaagaatacctcgatttcatgaaatatttctttttcatag

SEQ ID NO: 270 - DNA, 3921 bp, Unknown
  metagenome-derived sequence
  misc_feature (1)..(3921): Unk103 native DNA (opal coding; TGA>Gly)
atgatcatggtaaatctagaaaattttaaaaatttgtatgaagtgaggaagaccgtcagattttgattaaatcaacctagtaagaaaagtgatattaataaaacgcattgactattaaaagatttggttgagatttcttttgagagagaaaaaaaactaattaataatgaaaacaatcaagtactgattgatacagagaaagttcttatagagaaattacagcaatatgtaaattgactagaaatacaactaaaaaactggaaatgaacatatcaaagatatgatttaatagctataaataaagactattataaaatattggcaagaaaagcaaaatttgatgctatgtgggaaattactaaatttgataaaaaatcaaataaatacataaaagttaaacaaccccaagcaagtcaaatttctttatcatcattaaagatttgaaatagaagtgatagtattattcaatattggtgagagataattgagaaaacagattatttactcaatatttttaaacctaaattagaacaatacaagagggctattaatgatgctaatagtacccatattaaacctgatagtattgactttagaaaaacctttttacaacttttgaaactaactaaggaatttttacaacctttattggatagatcaattattttcgagctttcaaagaagaaagtttctgaagaaattgaaaagatttctgagtttgcttgagaaaaaaataatataaaaatttatgatgtactaaaaaattgagaagaacttagacaatattttgaagcaaattgatcccaagttccatattgaagagtaagcttaaattaccatacagcagtacaaaaaccaaataattttgaacaagaaattaaaaaagctatagaggatttatgaatagttgagttcttgaataaaagtgaacaggaaattacaagctatttacatcaagattcaaaacaaaaaatacaattattacttacttcaaaatctccttatcctattgagttattacagttatttaaagtaaagcctattcctttttcagtaaagtataatttggcaaagttcattgagaaaaattataagaatgaaatcaatttatcttatgaagagattttagataaattgaatttgttatgaagagctattgatgtcgcaaatgattttaaaaattctaataataaaggtaatttttctcttgatgaatatcctgtaaaattagcctttgattatgcttgggaaaatacagcaagaagtttaaaaagaactatacctttcccaaaagaaatatgtgaagagtttttaaaagataattttgatatagatattcataatgcagattttaaattatatgccaatcttttattcatagcggataatctagcaactattgaatacaataatccaaataatgaagcagaacttataaatgagataaaacaagcatttgactctatagacttttcttttgataaagaaagatattgatgatataaaaatgatgttttagtattgctaaataaggcaaaatctcaaagagactattccactatattaaaagcaaaacaagaattgtgattattgagatgatgactgaaaaataagattaaaaaatacagaaatttaacacagagattaatagacaaaaagaattcacatttttgaatcgcgagttttgtgggaaaaacacttgctaaaataagagatcgactcaaggaagaaaatgaactcaataaaatttctcattacggagtaattcttgaagataaaagtcaagataaataccttcttatatcacaatttgatggaaaagacaaaagagataagattgttcaaaagctttgaatatgagatataaaggtgtatcaagtaaattcttttacttcaaaagcattaaataaatttatcaaaaattcttgatcggaagacgcaaaaaaatttcactgagattttagatataaacataaagaagtttcaatatatgatgaaaaaggaaaatggacatgatatcaggaaagttttttaaatcatataaaaaagtgtttaattgactctgagatttcaagagaacaaaattggaaagcctttggttgggatttttcttgttgtaatacttatgaagagatagaaaaagaaattgattctaaatgatatcagttgactgaaaactctattttaaaagagaatttagaaaaattggtgaaagatgaaggttgttcgttgttccctattattaatcaagatatttcaagtcaaaaacaagaaaataaaaacatttttactttagattttgaaaaggtatttgagtgaaaagaatataggattcatccagaatttcctatcttttacagaaagccaatggaggaacacaagaaggagaataaattgtgaattataaatcgttttggaaggttacaactattagcaaatcttggtatagaatttattccaagaaactcttcttttaaaacaaaaaaagaacaaaatagaattgcgattgatcaaaagaaacaaaatcagttagtgcaagagtttaaccaagaaaaagtaaatacatattttgaaggattagataattattatatttttgggatagatagatgaatcaaacaactagcaactttgtgtatcacaaataaaaattgagttatacaagattttgatatttatacaaagcactttaatagtgaaagtaaaaaatgggaatacaaatttcatagaaaagattgaatattagatttaactaaccttaagattgagtctgataaaagttgaaataaatatatagtagatatatctttatttcaagctaaagatgaagattgaaatcctaccggcacaaataaacaaaatatccaacttaagcaacttgcatatatcagaaaattacaatatcaaatgtctgcaaatgaagaatgagttttaagttttttggaaaaatataagaacaaagaggaaagagaacaaaatatgaaagaactaattactccatataaagaatgaaaaaattttgcagatttaccaatggatatttttcaagaaatgtttgaaaattattatagattaaaaactgatcaaaatttgtctgaatctgagaagaaaaatcttatgaagatcactacagagcttgatgcaagtgaaagcttgaaaaaatgagtagtcgcaaatatgataggagtgatttattatttgatgaaaaaatatgaatataaagtgaagatttctcttgaagatctttcaaatgcttggtttttttcaaaagacggactttctcgagatgttgtgctaaatacgaaaaatgatgaaacaatggatttaaagaaacaagataatttagcgcttgcttgagtgtgaacatatcatttctttgagatgcaattgttgaagaagttatttaaaatttctaccgaagaatgaattttgcatttagtcccaagttttggaagtgtaaaaaattacacagagatttttaaggataaggggaaatatgtatataaacagtttggtattgtttatttcgttgatccaagaaatacaagtaaaaaatgtcctgtttgtttaaatacacaaacgacttgaaaaaaagaatgaattccaattataaatagaaattacaaaaaatctaatatattttattgtgaaagatgttgatttcaatcaatacacagtcattgccaagaagaaaatattaaagatagtaatggttttcattattctgtagaagaagtagagagaatagagatgaaaaataaagaagcaatagaaaaatataaaaaacaatgaaaaaatcttcattttataaaaaattgagatgataatggagcatataatatttgagagaagataagagaacttccaaaaaaatcagatgtaaagaatacctcgatttcatgaaatatttctttttcatag

SEQ ID NO: 271 - DNA, 3486 bp, Unknown
  metagenome-derived sequence
  misc_feature (1)..(3486): Unk104 native DNA
atgaataatttcaagaatttgtatgaattaacgaagaccttacggtttcaagcaattcctcaaaacgataaagcgaaagataagaaaattatcagtgaaacaaacccggatatttttaaatttacaaaacaatgtcaaaaaattcaggaaaattttttagatattttttgttataaagacgcttttgaagaagagaataaaatagaatttaagaaaaagcgaaaaataaggtatggttggttaagaaattacataaaaattgatttttatgattggaaaaaagaaaataatcgaaatgataaagaatattttttaacagaagttgactatttaccgaaagaatttttaaggtggataaatgagtggcaagaacttacaaataagttagatgagtttgttgataaaaatgaagaggaacaggaacgaaaaagtgagattgcttttgtcttgcgtgggtttttaaaacggcaaaattttgaatttattcaagaatttgtaaaagcggtaatggatttgcaaaatgaaagtggaatagagttagataaaaaaataaaagagttaagagaattaatttcagaaacttatagaaatttaaaagcctgtgaaagaaagtatttacccgctcaaagcaccggagtctgtttatataaagcaagtttgaattactatacaataaacaagacaccaaaatattacacaaaagaaaaagaaaaaaaagaaaaagagttagaaatggaaattattgattgtaaagataaatttggaaaaccagagttttggtttgataaaaagtttaattttagagaaaatccactttattggactcttgaagatgcctatcaaaaaatgaaaatttggaaagcagatcaaaaatcaaaatttaatgaaaaaattgggaattttatttccgattatttaaaaaaagaatttaaggaggatgaaataaatcaatcacggttagaaattgcaaaaaatattttaaaaaaatatccgttattttcacctatcaaagaagacttttttatatcttttttagaacagacaaaggaaataaaaataaaatctaaacaaaaaaatgatattctgcaaaaaaatggagatataaaatcaaaagaatttgaaaaaataatttctcaaaaattacaaaatagaaaggttctcacagaagatgagaacaattttgagcaactttcaaaagaaatagctaatattgccaaagagagaggaaaattttttaatgctccaaatcaaactattcaaacaaaaaattattatgaattgtgtgaattgtacaaacaaattgcgatgaagcgtgggaagattatcgcagaaataaaagggttggaaaatgaagaagtgcaatcccaaatgctttctcattgggccttggtggtgcaaaaaagggaaaaaaggtatgttgtttttatttctcgtggagaaaatgaaaatcataagaaggctcatgattggctagaaagaaacaaagagaatttacaaaaaaaatcagatgattctgttattttgtatcattttaaatctctcactttacgagcattagagaaactttgttttaaagaagttgaaaatacttttgctccaaaattgaaacaagggggagttaaggttaattttacgagaattaaaaaagaatccggaaaagaaaaaataattgatgtttatgagtttccaaggtgtaagcaagaattaaaaacagataacgaaaaaataaatttttatttagaagttttaagatttgaagcaagtagacaagattatgaacttaaacaattagatttagttgatttcggaggtttgaaagaatttttagaaaaatcatctggtgattttgataatctgcaagaatttgaatcagagcttgaaaaggtgtgttatgttaaagtacttctttattttttggaagatcagtatgataaatttttagacatactaaatgcaaaagagtttgaaataacaactcgaagtatctcaaaagagagtaagagaaaagaaaatgcacatgcagaaatttggaaaaatttttggaatgatgaaaatgaaaaaagtaattatattacccgattaaatccagagatgagtgttttttatagagacactcttgatacacatgaagggaacagaaacaggttttcagaacctcgttttacacttgcaacaactattacactcaacgcaacggctaaaaaatcaaatttatcatttaagacaatagatgatattaaaaagagtattgataaatttaataaagggttcaataagaattttagaggagaatggagttttggaattgatagaggattaaaagaattagcgactttaaatattgtaaaatttgcaaaagataaaaatgaatttggtgtttcaaaaccagaaaattttgcagagataacagtttataaattaaaagatggggatacatttttgaccgatagtagtggtaatgatttgataaatgcaaaaggagaaaaaagaaaaattattgataatatttcggaggttttgcaagaaaatgtggaacctgactcagaactatttgagaaacaaattatttccagtattgatttaactcaagcaaaacttatcaaagggcatattattctgaatggagatcaaaaaacttatttaaaacttaaagaattatcagcaaaaagaagaatttttgagcttttttctacaagaaaaattgataagagttcagagattacaggaaaaaataattttataattggtggtgagaaaatctattttgcaacagaatggcaaaaagaaaataaacattggagaacaaatagagaaataataaaagctgatttaaaagattatttattgaaattagataaaaaaaataaatttgaagatattgagcaaatagaaaaaataaatcatttacgagatgcaataacggcaaatatggttggaattatttttcacctgcaaaatgtactagggatgaatggttttattggattggaaaatcttgatgtaatacgaaaagaacttttagaaaatgaaaaacaagaagacaaaaaaatgattgaagagcattttgatcagagtaatgaagatatttctcgtcgtttggagtgggcattgtatagaaaatttgcaaatgttggggatgttccaccacaaataaaagaatcaatattactgagaaatgattttttgacctatcaaattggaattttgaaatttgtaaaagttggcggaacaagtcgaggttgtccaaactgtaaaatattttgggacaatgggtgtggtagtaaatgtaatccaaagtgtagtaggtgtttggaaaatgaagaatataagaaaagtaagaataaaaatatttatatttgcaaagacgtaaaaaaatgtaaattttcaacagaagaaaatcgaaatttattagaagaaaatcttaataattcagatgaggttgcagcatataatgtagcaaaaaatgcttttgaggaaacatattaa

SEQ ID NO: 272 - DNA, 3747 bp, Unknown
  metagenome-derived sequence
  misc_feature (1)..(3747): Unk105 native DNA (opal coding; TGA>Gly)
atgaaagagtttcagaatttgtatgaagtgaggaaaacggtgaggtttattgcaaaacctactaaaaattcaaaatctattatagactttttgaaaatatgaaataaatcagataataatgagaaatataagcttctctgagaatttctaaataattttaataaaattatagattgaagtaaaaaattatttttttatgaaaattcctgaaatttaaaaaatttttttaagataaaatataagtttctacaaagtcatacaaaatatgatttttatgacaggaaaaaccttaataaaagtaatgaaaagatttatagtttcaaagatattgattttattgaaaattttttaataacctatttcgaaaatttagatgaaattcataagaacctaaaactttaccaatctgcacaaaaagaaaaacaaagtaggtatagagaaatttgattttatttacaaaaattacatggaaaaaatacattgattttaaaggatctgtttgaattcttagcaaaaacaaataagtcttgaattgataataaaattgaagaaataaaaaacttattaccaaattttgaaaataaattaatcaatattttaaaagaattttgaccaaataattgaatagaaatagccaaatgatgctttaactattacgtcttaaataaatcatcaagagagtattttaattgagaaatagaaaaactaaaaaaacaacaaaaatgaagtttacctaaatatatttttaattttaagtataaagatgagaataaaaaagatatttttgtaaatttagatgaaatattttttaaaaatatatgactttctaaaaaagaaattgaggaaatgaatttgaaagaagcttatgattttataaaagattttaaagccaaaagaaaatcggcttttaatcaatttgtttgaaatttatatacttatgaaaatttattagaaaataaaaagagtaagtataaatataaagaaaattgaaaattaaaagaagaagaaatgtctgttgagttattttgtgatatttgagaagaaaattttacagaatttaaaagattaacaaataaaataaaagaaaaatgaagtaaaaagaatgatattttacaatgattatgatgattaaaaaaagatgaacttgaaaaaataattaaaaataaagagaaaaattgagaatatttagaagaaagtgaaaataattttaaaatcttatctttagaaatagaagatttagcaaaggaaagatgaaaattttttaatataccaaatgaaaaaatctatactaaaaattataaagaattatgtgaattttataaaaatatcgcccttaggttatgacagaataaagcaagaattctttgatatgaaaaacaaatcgttgatagtgaaaaacttattttttttgctacaataattgaaaggtgagataataagtttttagctttaattccaaaatgaaaagaaagacttcatcaaaaggcacatgattttctagataaaggagagaataataataatgattgaactataaaaatccattatttcaaatctttaactttaagagccttacaaaaactttgctttaaagaagataaaacagttcttgtttgaatagaagataaaaatacctttattagaggcattgaaaaagaactttcattaaatcctgaaactcaaaataaaaaatatttctttaaatgaaaattaaaaagatttgatgaattcaaaatttataatagatttttgaagaaagaagagtgggaaatagataaacaacttttgatagaattttatcaagatgttttacaaactaaatcagcaaaaaaagttttagatataaaagacttttgattagataatgtcttaaatgaaacttttgaaagtctcgatgattttgaaatagaatttgaaaaaattgcttatataaagaagactttaaaaattgatgaaatttgatatcaaaaatttattgaagatttttgagtatttttgtataaaataaattctcaagacttatctataaataacatagaacacaaaaataaaaaacatactgattattggcttaatttttgggataattttaaaaataagaattatgatataaagataaatccagaatttagtttatattatactttagcggataaagatttaaaagaaaaaaaagaacaatgattattaaaagaacctataaaactatcttgactaagaaatagaaaaacaaagcctcaacttatatttactacaaattttagcttaaactcaaatgaaaaatcagaaaatttagcctttttagaaacttccgatttaaaagaaaacatagaaaaattcaataataaactagaagaagatattaatcaaagatattcccaaaatgatttgtggtatttttgaattgatagatgaataaatgaacttgcaaccttaagtgttacaaaatttctaaatacaaagaattttgaatttgcaaaaattaaatgtttaaagttaaaagatgaatatgataagataattgatataaaaacagatgaaaaatgaattactaaatatatatttgaaaaatcagactatattacgtattacgacaaagatgaaccacacaaaagatcttttgagatttcaaaaaatatttcatattttttgaataaatcagatttttttgagactataacaacttgaataattgatttaacacaggctaaacttatttgagataaaattatactaaattgagctaaatcaactcttttaaaattaaaagaactttcagcaaaaagaagaatatttgaaaaatataatgaaatagataaaaatcttgatataacttcgtgaaaatgaaatagttgaatttttataaaattaaataattgaaaatatattcaggtatattggttcaatgaagatttaatcataacatctcaagaaaaaaaagagataagaaaatatagagaaaatttacatttaaagattatagaaatatttaaaacttattttaaggagatagaaaaaaataataattttgaagatttagaaactatctcaaaaataaatcatttaagggatgctattacttcaaatatgatttgaattatatatttcctaatgacgaaaaaaaactgatatttctgaaaaatagttttagaaaatttagatgacaccatatgatttacttgaatagaaaaaactaaaacaaaaaaatgaaaatttgatggaggaaaagagtatacatgagaagaaataaaaatgatcgatgggcatttctatcaatcaaatacagatatttcaagaagacttgagtggtctttgtacagaaaatttcaaggtatttgatatgagtgaatttgactagtacctccagaaataaaacaatcagtatttttaaaagatgatttctgagtttataaattttgaattatagaatttataaaaactggttgaactagttctacttgtccttattgtgagataaaaagtaaagataaaccatgattaaaacaacatcacgaaaaagataattgttgattcaaaaaacaagtttgagaatatttagagttttataataaggataattctataaattatgatagtattgcggcatttacagtttgaaaatttagttttgaatgaaaaactccaaagtttgaaaaaacaaaaaaagttgtcgaatattctaaagtaaaaagagaagaaaatgtagtatttaaaagatcaaaaaatttatcatataataaaaaataa

SEQ ID NO: 273 - DNA, 3543 bp, Unknown
  metagenome-derived sequence
  misc_feature (1)..(3543): Unk106 native DNA
atgtcagataaaaatcaatcgttttcacaatttacgaatttgtatgagttgagtaagactttgcggtttgagttgaagccgagtgaaataacttttgaaaaacttgaaaataataagttatttaaagttaaagatgtcgaatcaaaaatattctctaaaaatgaaaatggagagatttcagaagcagaaaaaaaagttaaaaattatttatttgatataaatgagactgaactaaataatttagttaaaaaatgtgatgaaaaaattgaagaaattaaaaagataaaagattttttagaaaaaaatcctgataaattatggcaagtgtggattgataatgaaaaaataaaaattatagataaagatttgaaatatattctacaagaaaaaaaatcttgggaaaaaagtttttggaatgaagcaaaaaatgataaaaaaacaggaaatttaggagtacaaagtacttttagagttgaatggaaaaaaggattatttttaacttttgatgatgtagatgcttattttgaaaaaataagaagtacagaaaattctgaacgaaaagttggggaatttacaaaacaagttattgaacgattagattttttattgaaacaatatcgaatcagagaattacaacttttattaaatacaaaaggagatacggaacaaaatgaaaaaaaactttttcaaacaaaaaaagaaagagtagcacgaatacgaaattacttaggtatttttttaaaattagaacgaatatgttcgctatttaattatacatatgaggatagtttttgtgagtttccgttagaattaaaagaaaatttagaagagtataatttagatttaaaaaatattatttcagaagtagaaactatttttagtgaatcaaatttatatcttcataaaaatattgagagaaaatttactttgaatattcgagctataaatccacgaccagaaagtgatgatcctaaaaataataaaaaacttacagaagataaaattttagaaaaaatagaagaattagaagaaaacatatctaatgctaaaagattaaaagcagaattaaaaggagaaagaagttacaagaaaaataatggagaaagaaactatgaagatcacaaaaaacaagaatgggatactgttttgaaagaattaaatccaagcaatgaagctggtttattttctcaacttacacaattacgaagagatttagaagaagttcatttaactcattttggagtacttttagaaaaagatggtttattttatttagctcttgaaaataaacgagtaaataatggtaaaaatggtgatattaaaaaaatgggagactttgaattacaaaacttttttaaaaataaaaataaaggaaatgcaaaatatttatcgtataaaaatataacttttaaagcattaagaagactgtgcttagaaaaaacgagttcaatgaaaactaaatattttttaaataaagaaaatgaaagttggacagaatttactgaaaagggaaggcggaaaagagagcaacaaaaaaattggcgagaagagaaatattttgatgatttaaaacaatatcttcaggaaatattaaaaaataaagctggtaaaattggggtaaaatttacagataatgattttaaagaatgggaaaatatagagtgggatgaggatttaaaaaacttatcaaatttaattgataaacaaggatataaggctacttggaataattttgattgggatgcattgcaagagttagaagaaagtactgaaatagaaatctttcaaatatataataaagattttttgatagatcctgattttgcagtttctgataaggataaagaaaaggttgaaagaatgcagtttacgaaagataaattagaaaaagaagggaaaaaatttattccaaaatataaaaacccgaataaaaaagaaaaacaaaatttatatactacttattggcaaaatttttttgcagataaatcaaataaggaatttagaataaagcctgaggggaaattttatgttcgtttagcttcggaagacgcaggagaaaatggaaataaaaagttattagaaaaagaaacaaagaaagagtttgaaaaaataagaagaataagatttaccgaagataaaattttagcagattttaatctatggataaatccaacaattgataaagtacaatcaaaagtgaagaaaaaatctgaagtaaaaaatcatattgatgcgatgaataaaattcataaaactgatgaaactgatttttatgttttaggcttagaccgaggactaaatagtttggtaagctatgggctttttgattcaaatttaaatattgtacaaattaatggaaaaggaaattttcaggaaacgcaaaataaagaatatgataatactttagactttgtatgtggagattggagtttggtaaactctaaaggggtatttgtaaaaagagaaaaaatttttgacgataatgaaaaaaataaatatttcttgaaatgttgtgatattctcttttatcaattaaaaaaatacttagatattccttttgtaaatccagagacagacaaaaaattattaatagatgagtattataatcaatttatttatgattcagagaaaggtgaatatagtttaaaaattcttgattatgaagggaaacaatctggaaattctggagaattaggtgaatattattcttttgtcattttagaaaatgacaatgaatctgatagaaattacgaattaagagatgaaaatggtaatgaaattattattagagataaagatgacaataaagttttcgactatgttctttctttctatgtggaaaaagcaaaacgaatttttgcactcaaaaaacaacaagactttaattctgcattagaactgacaaaagaagaggtggaagaagttaaggaatttctttttcaatcagttgaggaattaaaagaaggatttaccaattttgtaattggggaaattgtaaaactttcaaaaaatattgccgaacaaaaaaataaaaaactttatatagtttttgaagatttagttaattatggaaaaaataagggagaggaactagaaaaaagttttacagaaatgcgtcatgaagaaaatttatcagttttagtttatcaaaaattagaaaataatttagtagagaaatttaattatttacagacaaaagataaagattctaacataaataaaactcagttttctccgaaaattcaaagaatcgaggatataaaggaattacagaaagaagataaaaaaggtgggcaactcggaaatttgatttttgttgatccagaaaatacttcaaaacagtgtccaaattgtttagaaatagggcaaagaaaacattcaagaccaactcatgattttgtaaaatgtaaaaaatgtggatttgatacgagaaatgatgacactaaaaaaggttttgattttatagatggtggagatactttagccgcttacaacatcgccaaacgaggattgaagtttttaaaagaaaaaaataatttataa

SEQ ID NO: 274 - DNA, 4257 bp, Unknown
  metagenome-derived sequence
  misc_feature (1)..(4257): Unk107 native DNA
atgcaggacactaagtcacttcagtttaaagataacccataccaatatacacgtgggattcgatttcgtatacagcccgtagtagaaagtgagagattctcaaaaaaaattcaggagatccagtcagctgacagtgcgggatctgatctgtctgatcttgcagagaatttgttaacatttcacaaggatttggaagaattgcttttttaccaattcgtatcggcccgatctgaaaacccggattcctgtagaaaagagaaaatacaaaaaaaactcaaacatgatcagtataaacaatctaaagaagatcaaaaaattggacagcctgttttacaggaaaagaaaacgaatacatccaaagcagatcaggaagtaaaactgaactctcgtatatctgtaaaaaaagcatggttaagagaatttcataaggatttgttttatttggaagtcggaaagaaacaagatggaaaatataaagcgcgtaaatatagactttcagaattaaagagcataggcggtgaactaaaagaacggcttaaaggttgggagcggtatagccttgagcttaaaaaagcctccgggcaacctcgggaatctaggcatagtgatattgcagaatatataagaagcttgagtggcagggatcagttgacttatatggagaggtttttagaggaaatctcaggttctgatccgggttcagatgagaaaattaattctttaaaaagccagttaaattctttaaaagaaaaactgaagtcagctcaggagttttatttttcttctcaatcctctggggtggaagtggcaagggccagctttaactattacacagtcaataaaagaccgaagaattattatgaagaaaagccgaaggaaatagaggaaaagctgaaggaaatagaggaacagttatacggatcgcatttaaagtttcagaatttaatagaagagaaaaaacaggagaactcaggcgaggggagtggtttttcaataattaaagaaacaacaaacgaaacatactgttggaaaaaaactgaacaaagaaaccaggaaaattcaggttcttacagtggagaaaaaaaggacaatagtatggatatcttttcgtttgtgagtgatcaggaaaaaaaatggattaaaaattactgtaaaaagcatcagcagaatgacctggaaaaagacgacgtctttctttctttagatgaaacttacagagctatgaaagcttttaaagccgaacaaaaatctattttttatgaaatagtaacacatatcgccagtaagcaaaacaacagctatgaaaacaaaaactcaaaccatcttctaaagggctggcagtttccttacagccagcaaaatttaaaggggatgaatacagccttttccttatttcaatttacagataaaaccatcaaaagcagtagatacactatagataaaattttgtcttcatgtaaagaaggagaaaatcaaagccaaaacaataaagttacgtcagagaaatgctatcagaagtttgttgctcttacaagacaaattcaggaatcaggaaataagaagaataataataacaggggtactatatctgataagtctcaaaatccaaagaaagatagaggaatttttctttttggtagcaactgttactttaaagaatatgggaagttttgcgaaacttataaaggtatagctcaaaagcggggccggaaaaaagcccaaataaaaggtcttgaaaaagaaaagcgggaggctgttcaaacggactattgggctttgatttattgcaatcaggataaaagacagttgtggctcgtgccaaaagaaaaaatgcaaaaagctaaaatagaaattgacaataaaaataacgaaaaaggtgacagcttgggaggttctcactatctgtgttgttttgaatctttgactatgagagctttgcataaactttgcttttctgaacagtctgaacaaagtggcggttttgttgcgaaaatgccggaagaattaaagcacctgcaaaaagaatcaaaaaagattaagacagatggtgatgttggtgaactggaaaagaaaaaacaaaaacagttgaatttttttaaaaaattaatggtgtctgattatgcaaaaaagaaattgtgtcttgaaaattttaatttgaaaaaagctattgaggctgagaatctggagacatttgaaaaagagctggagaaagcctgttactatattaaaaaagtaaattttccggaaaaagaaaaagatgactttatcaggatccataacataagtgtattggatatcagctcttatgatctggagggaaggaataaaaacacttatcaaacacctcttagtgagaacaggtatcatacagatttatggaagctgttttgggataacatagataattcggataaaaagaatacaaaagtcaaaggttttcgggtgggggaagtgaggctcaaccctgaagtgaaagtttattatagaaaagcagatgacaatttaaagaaatattttaaaaagaggaattttccatctaaatttaatcatcgcaaactaaattctcaatggactgttcatttcactttatcacttaatgccggaaaaaaatacgaagatctggctttcataaaaccggaaaagctcttggaaaaaattgatgatttcaatcaaaaattaaacagtcaaatggactttaaaaccgtatggaaatacggcattgaccgcgggaataatgagttggcgactttatgccttgttagatttaatcctgataagaagctttataaaataaataataaaaccattgttaagcctgttttcccaaaggatgacaacgcttctgaaaccactacatgctggacattaaaaaactccagctataaagaggagcatactacaaaaaaaggtgagacaagaacaagatgggccattaacaatctctcttactttgttgatgaaaaatatcttaataacagagagctttttgaggagaaaaatatcgcctgtttagaccttaccacagcaaaagtcattaaggggaaaattatcaccaatggtgatgtcctgacttacctcaaacttaaaaaaacagtagccaagcgacagctttataaactgtttcaaaaaggaaaaataacagaaaatgccagcctgacatggagcatgcaagaaaacggttctccagaagaggaaagatacaggcctgaaggtgttttaaatatcaaaacttctaataaggaagaaacaatttaccattattgcaagagatttgaagacatccttatcaataaagaaaacaacattacatacagtcaacaaagtattaaaaacagcttgaatcattatcttaatcaactgagacagaataataaggagcatactcctaaaattttgaaaatcaatcatctgagaaacgcggttacagcaaatatggtgggagtgatttgtcatcttcaaaaaacataccctgggtttgtgattctggaagatttgagtaagagtgatattgataggcattgtaagaacgaagaaaacatcagtcgaaggctggaaaatgctctctacaataaacttcagtcccttggcttagtccctccccatgttaaagatattattcagttgagagagaaacaatcaaagataaagtcacaacgacagaaagaaagagaaaatgactttaaagatttaaaaaggaaacaagatagaaaaaaagagttgggaaaaaatattgaaagtataaaaaaaggcataaaatgtgctagaaattctgaaaaaaaagaggagctaaaaaataagcttaaagacaaaaaagaagaaaaaaatggtatagaaaaggaaatatcaaaattgaaaaataaactctctgacgaaaaaaatcaaaatcaatcctcgcaaattggagctattgtttttatccctaaagaagaaacaagcaagagttgcccttattgtgaagaaaatcaacaaaaacaaaatgaaaaagacaaaacatttgggaaaagaaaaaatgaagaaaaatttaaacagcatcgctttatctgtggagaacgccagccttgcggttttgatacctatcattttaagaaagaagaagatagggcagagaattatacaccagagccggataagcaaaaatacaaagaagattttaagtggtttgaagctcttgatgatcccgataaagtggcggcttacaatattgcaaaaaagatcactgatcctgaaaaaattggaaaaatgaatcaggattcttaa

SEQ ID NO: 275 - DNA, 3105 bp, Unknown
  metagenome-derived sequence
  misc_feature (1)..(3105): Unk108 native DNA
atgctgaagtataaattaacaaaagccatacgttttaaactaaatgcagaacatgcgccttcattaacagctaaagccgagagtttacaggctgccgaaccggaagggcaacccgcttcgttggtgaatgaaggatataacttagcaaacatctttgagaaatatattttcagcgataaggaaaagaaaaagctaagtccctcggtaaccatacatttccggtggctcaggcagcacacgcgctatgcattctatgagtggaaaggagaggatacgttaaaagataaaaagccaaagctggcggatgtgccttaccttcctgagaaattagcggggttgctttctgagtggagaaataccctggaaactctgaacatcgcagccaatgcgcccaaagagtccaacacccgcaaagccaatatggggcttgcaattagaaaacttggaacgcgttccatgtttccgtttatagaaagttttattaaagacagcaacccaaaagattccgatgagctaaaatcacagattcttcaggcaattgaccgttttaaaacattgctgaatgaatgtgagtactggtcaatgacttcgcaatcatcaggtctcgaaatcgcccgcgccagctttaattactataccattaataagaagcctaaggattttaataaggaacgagagaaggtggaaaaaaatttatcagcgcttccgcaggaaataagattatccgccattccgggctataaactattcatcaaatataatgaagaagggaatcagtatgtcatcaaacttaagatgaatgacaaagagctatgggaaacagtaaacttgaaaagtctatataaaggattaaagcattttaaatcagaacagaagagcgcgtttgcacaagcaataacacagggtctggaatacgaaaaatcagagagatttccattgttttacggataccccgatgctttcaatagatatgttgagctgacaaataaaatccagaaaaaggcagagaaaaagaataatgcaaaaaaagacagcgaggaggcgaaaaagctgggagaggagataagccggctgaaacaaaaacgcggcaaattattttttgacgaacaaaacaagtcgggcgagcctaaagaacgatttgaaaagtatgttagtttttgtagtgtttttaaggatgtagccataaaaagaggacagctcatcgccaggctcaaaggcattgaaaaagaagaaatagattctcagcgcctgcaatactgggcggtgataacagagaagaacggaaggcatcaagtggcgctgatcccgaagcaaaatgcccaaaaggcatacaagcaaataagggaatggcgcgaacagcccggaggctcagtcatcgtttattactttgattcgctgacgtaccgttcattaaaaaaactttgctttggcataaacggcaacacgttcctgcctgaagtcaaagaggaattaacgaaacagatccaatggaattatcctgaaggggattttggagagcatacctttaaaaataatgattcatcaagagatgaacaggcgttgattgcattttatcaaaaggtgctgagcacttctttcgtaaagcaaaatctgacactgcctcccaatttcgcacgggaggttttaaataaggattttgataccgagcaggatttccgtatcgctctcgaaaagtgctgttatgtgcggcataagaaaatatcgggtgaacagcttgaaagatttctgcacaataacaatgcagaggtcttttcaataaccagttttgaccttgaacggcttgacaggaagaaggatgaacaacggaaagcacataccagactttggctagatttctggaaacctgaaaacgaaaatgagaaattccccttgcgtctgaatcctgaaatcactgttacatggcgcgaacccaaaaaatctcgcatggaaaaatacggtgaaggaactccgttgtatgatcccggaaagaaaaaccgctacctgcacccgcagtttacgcttgtaaccacctttaacgaaaatgctcttgctccggaaatcaactacgcctttcagaatgctaaacagaagggagaagccattatcagttttaataagcaagtcaatgccgctttgaaatcaaaatatgaaaatgacaacctttggttttacggcattgacaccggcaaggtggagctggcaacgatgtgcctgatggataaaaacaaaaaattgcaaccgttttcagtgcttgaattaagagagggtaaacttgattatgaaaaaaccggctatcttaaagaaggaactcaaaaatcctataaagctgtcaagaacctctcctatttcctcaatcccgaattgtatgagaaaacgttccgcgatgtaaactttcaaaaaacctttgatgaactgtttttaaagaaggaagtgcctgccattgatttgagtaaggcaaaagtaataagcggacatatcgttttgaatggagatattgccggatatgaaaagctgaatacactaagtaatatgcgacaggaacaaagagagcagaccattacattagataaaatcaatcatgtaagaagactgatagctggcaatatggttggcgtcatcagccatctttataaaaattttcccggctatcttttgttagaagacaatgcccaaagttggattgaagatgaaaggctgaaatttgaagggagggttgaacgacctcttgaatgggctttgtacaggaaatttcaagggtatgggttaacgccccctctttcggaacttgtcagactaagggaacaggaaaaatttaagatatccaacggaagtcaacctcgatttgcgacaattaaacagttcggagttttaatactggttaataaagaaggtaccagcctgcattgtcctaactgcggtaaaaaagcttaccaaaatgataatgagatcatgcctgataagagtcaaaagatttttcaatgcaagcattgcggttatcataaccgcaacaaccccttaggacttgatgggctgaactcaaatgataaagtagcagccaacaacattgccaaacgaggattagaaaaatttcttaaagaaatatag

SEQ ID NO: 276 - DNA, 3042 bp, Unknown
  metagenome-derived sequence
  misc_feature (1)..(3042): Unk109 native DNA
atgatttataaaaactacgaatttacaagatcaataggatttaatttaaaagaaaaagacactcaaaaaatttacccctcatttgacagaaaatttaatagcgaaaaagatcgtcaagaaattttgaaaaattttttgaatgagtatgataatttaataaatgcctttaaaaaggtggttttttacaaagaaggagaaatatcttttaaacttgagataaaatatccatggcttaagcgatatactaaaaaacaatattataacagtcataatgataaggttaagaaatacactgttaaggaggctccatacttaaaacaagtttttaatgattggctaaatgctaataatgaactcaagaatgaaatgaaggatgtatttatccgagaattgcatactcaagctaaggaatctgacatatcgctattaacaaaaaagtttttagggcatgataatttttcttttgttagagattttattcagtatgcaaattgcaaagattctgagcaatatttagatgaattacggaaagtagtagaaaaaatcagaactatagctgaagatatcttacaggtgacttctccgaaacaaagtcatgggatagaggttgccagaggaagttttaatttctataccataaacaagatctcaaaaaatttcgatgaagatatttctaagtggaaagataaatttaaacaaccttcttataatattaaaaatattggatatggattcccagactatattaaaactaattatggagtctataaacaggatgatttatctatcgaaagtttatataaagcactaaaagaatttaagtcacaacaaaagaaattatttttagaagctattgataaaggggaagatatagaagaaataaaaagaaaattttctttattccatcggaaaaatggattagaagaatttattaatactactaaacaaaaaagaagcaaattctttcagaataaatggggttttccgaattatattgagttttgcgattactataagaaaattgcccaagaacgaggaagaataaaagcagatatccgtgctttagagcaagaaaaggaagaagccagattgcttatgcattgggcgcatataatagaatacaatggagctcgaaaacttcttctattacctaaaaaaggagataatttatatcaagcaaagaaatatttggaaaatataaatagtttacaggggggagattatatcctttattcctttaactcgttaacgctgagggttcttaataaattagttcgcagaaacattccaaaggaaatacctaaccttaatgaagatcctgttgcaatctataaaaaagtattaagcggatattataaaaagattgatttggattttttaggttttgaaaatcaaatacagacaataataagcaaagagtatcaaaatgaggaagagttccgtattgctttagagtctatttcttattctttacggaagatcgtattaactcaaaaaaatattaataaattacaaaatgattatggtgctttattgttggacataacaagctatgatctagaaagaaagataaataacaaaaaagaacatacagctttgtgggaagagttttggtctaaagaaaattggagtaataattttcctctccgtataaatccagaattccggatttttttcagagaaaaaataaaaaatcaatcctacaaaaagaaaagaaatcgtttttcggaggataatttaatggtatttttcaacttaactcaaaacgtagctcaaaacaaaatggaggttgcttttaaagacagggatgggctggttgccacagtaaaacagtttaaccaggatgtagttgaacctttaataaaagaaacaagagataacctttattattatggtattgatagaggccatacggaattggcaaccttgggaatcgttcagttttctaatgaaaaatatagggttgagtataaaaatggagaggtgaaagaattctgtaaacctatatttacaaaagtaaagacatatagaatcaaggataactatctcaatcttactaaagaaatagaagtggatagaaaaggcaacaaaaaagaagtaaatataattgaaaacccgtcatattttgtagaagacgatgttttggaagaagtaaattcttcttttataaatctgacaaaggcaaaattaattaaaggaaagattatattgaatggagatgtaaaaacttatcttaatcttaaagaagaaaatgccaaaagaaagatatttaatatttataatgaaatagttgaagaatcgaagattgaatatgttgatgaaagtcatcccgcaagctcaaagaatcaactgaaaaatgcttttgttgttcctcttacaaagaaaaatcgaggccatgaaattctgtgttactttgataacgagatagccaaatataggagtttaaaagatatgcgaaagatcttacaaggatatttggataagttaagagcaaatgaacaaacagaaggaatttctattgatagaattaataatctaagagacgctattacttcaaatatggttgggattgctgctcacctttttgaaaaatatccgggtgttataaatttagagaacatgaataatactttagaaaattttaaaaaaaataatgaagacatttctagaaggctggaatggagcttatataaaaagtttcgaaaatatggattagttccccctctgttgcgacagacaacatttttgcgagaagaaggtggtaaaagtgataaatctaataaaataaatcaattcggaattattaactttgtgccaattaaaaatactagtggtgagtgtccatattgcagaagaaaaaaaacattaaaagaaagaaaagaagaaaaatttagtaaaaattcttatttttgtccagaatgtgattttaacacgaaatctccgccaatttttatgcgatctattgacgattccgataaagtagccgcttataatatagcaaagttcggtctagggataagaagaggaaaaaatattaaataa

SEQ ID NO: 277 - DNA, 3105 bp, Unknown
  metagenome-derived sequence
  misc_feature (1)..(3105): Unk110 native DNA (opal coding; TGA>Gly)
atgcaccattcattacaaaataatttaaatttttttgaagtacataaaaatattagatttttattagaacctctttttgatgaaaaagatatgatagaaaacaaaaattgaataaaaaataatactcaaatatttcttcaaaaatatgaatttattatcaagcaactcaattttatactattaaattcaagaaaaagaacattaaatgcaaaactaaaaatcaagttttgcttccttaaaaaacatactaaaactctatattttgaatacggtattgatactttaaaaaataaacataaaaaccaaatagaaatgaataaaaaagaacttgaatatttggtaaacatatttgaaaatttttttcataaaaatcttgactatatagaaaaattaaaaatattgttacatacgccaaatgctcaaaataaagatattcaatattattttcaccaaatattgagaagatgaaattttaattttatacaagatttatcagaaagtattaatactgaaattccaaatacatatggaaaaattatcgaaataaaagaaaccctagaaaacttagaatacataaaaaaatctctccaagatgaattatatcaacaacaatgttttgggaatactatagaagtcgtaaatttaaactattttcttgttaataaaaaatcaaaaaattatacagaactcatcacaaataaaaaaaatactctccaacatcatatatttgcttttccaaaatttttagcagcgacgaataataatggattaaaagattttgaaacatattacaatattaactattctgaatgaaaattagtagaaacttatgagctactcaaagagtataaaagtagtcaaaaagaaggatttttacaatttatcagttctggttatacatataatgatttaatacatcataaaaattttttatttaaaagtagacattttgataccaaagaatttatgctaagtatttatctgtttgatgatatatcaatgagagattttaacataattcaagatctatcattaaaaattatgtttcttatcgatttagaaaattatccagaaaaaattacttctagtaaagaaaaatataaagaattgttttgagaagatattttgactgataaagcatatatagaggatacaaaatgaaaaattatgaagaaattagtctctataaaaagacaaagatgaatgttatttaatacagaaagtagatattgtgtttttaggaaatacatcaatttttgtgctgaatataaaaaaattaccttagaaattggaaaaataaaatctcatattaaagccttaaaaaccgagcaaaagcaaattgataaaaccaatagttggggacttattttagaaaaaaattcacaaaaatttttacttacaatccccagagaacaacaaaatgttccatattttgataaaagcaataatatacttcaagcaagacattttatcaaatctctttcatatcaaaatgatgattctacgcttttttattttgaagcgctgaatttacaaatactcgatacactttgtttttcaaaagaaaatacaaattttagaaataaaattgcaaaagaactctatggtataaattctcattttgtcgaaaaaaaagaattcacaaaactaaataaaactattgaagtttataatatcaaaatgaaatatgaacttcctaaaaatatttatggcgaaacttcaaaaagtactctcctccagttttatcaatcaattattaaactcaattctttgaaagaacacctcattatcgaaaatcctattgaatttgaaaattttaccaaaaaagattttacttcattagatgagtttgaaaaaaaattaaaagaaatttgttatgtaaaaaagatttttaatatttctgaagataatttagattttttaataaaaaaatttgattgacgtctgtataaaattacaagttatgacttagaaaaaaaccttaaaagagaaaatataaaaccacatacaaaaatttggttagatttttggaatgaaaaaaatcaaatcaacaaatatcctattcgtatcaaaccagaattaaaaattagttttatcaaaaaagatgattctttgagtgaaaaaaattcagatataaaaagaaatagaaaactagaaaatagatttttacttaccacaaatatcacagaacatgcttgtaaacatcattgaattataagcgaaaatactaccaaacaaataatagatttttatgaaaattttaatcaaatatttgaaaaacatccttctacagaaatattatgatataattactttatagatgtttatgaaaataattcaatacatctctccatatatgaaaatcaaaatactacctatattcctattgagagttatgaattaaaagaagattttttttcaatgaccaatgaaaaatgaacaaaaatttataaaaatatttcctactttcaatatgatgaacatcaaaatttatattccaaacaagaaaaccaatatattgatttgcaaacagccaaactgataaatgggaaaatatattcaaactgagatatttctacatatttaaatcttaaaatgatatcagcaaaaaataaaatatctcatttttctcatgaatattctcatattaaaatttctcaggaaaatcctgaaaacatagtattatactgatgagataaacaagaagtagttatctataattttgataaaaaatatgactccatactttctcaatcttgtattatacacgaattagaagatttcttggaaagaaaaaatattgagtgatatttttctgaagatatatcaatacaaagtataaataatctaaaaaatgctctttgttgaaatatggtatgagttatattttttctccaaaaaaattatccttgaaaaattattatcagaaattttacgcataaaaactactctcgttcgctctatagtttaggaaaaaattttgaagaaaaaatattacaaaaactttcatcactcagtcttattccttcaaattacaaacatatatttacattgaaagaaaataataccttaaataaactatgaatcatagagtttgtaaattaa

SEQ ID NO: 278 - DNA, 3531 bp, Unknown
  metagenome-derived sequence
  misc_feature (1)..(3531): Unk111 native DNA (opal coding; TGA>Gly)
atgtcgtatattatgaatgaaaaagaaatgcaaaacttgtatgaggtgaggaagacggtgaggtttgagttagtgcctcagtttatttgaactaataaaaaaccagcttgaaatactgaaaatagagtaaaatttatttttgaaaatttgataaaattaacagatttacactcagaatttgttaatttactttgaaaaactcttgttaatgaaagagaaaaaatcataaaagaagaagaaaatgacaataatcaaagtaaattattttcaaaagaattattggaaaaatttggtctttctaaaaaagagagcttaacttcagaaaatagtaaaattataaattacttttatgattacgaaatttgaagcttagttcaattcaaatataaatgactagaacaagtttttaaaaatgattggattgaaaataaaaagaaaattaagtatacaatagataaatattgaaacgaaaaaaagaaaaataaaaactatatcacacttacagacttatgagaaaataattttataaaaaagtattttgaagaatggtttgaaaacaataaaaaaataaatactgaactaaataaatttaaattcatagaaaacgatttgtcaagaatttctgatatttgagctgaaatacaaagattaaatggaagaaattatttatgaaaactttatactttatttgagtgatgatatttagttcataaaaatgatgtaaatattataaataatttaaaggaaaaattagctgaaataaaaaagttgataaaaactttactggaacttacaaaaccaagtcaatctttttgatttccaatagaacatatttcactgaattattatacaagaaacaaaacaccaaaacaatatgaagaagaaataaaagcaaaagaaactttattaaaacaaccttatttgtgaaaattgtgaaatctttattgaattaataaaaatagctcaatagaagaattgtataaagaaatgaaaaaaattaaagcaagagaaaaaagtgcttttatgcaattattacaaaaagaaataccatatgaaaatattcaaaatccttttgtatataaagattttgagtgaaatgaacatgatgattataagattcaactttttagcaatataaaagaatgagaagattggaaaacaaaagaaaaattaacatctaaagatatatataataaagttctgaatctaacaaaacaaatagaaaaagaaactaataaacaagaaaaaactaaattaaaagaaaaaagatgagaacactattttatgtgaaataaagtttttcctgattattttagtttttgtgaagactataaaaaggttgctagggaatattgagaaagaaaagcagaagttttgacacttgaaagagaaaaaatattagcagaaagagaaagatgatggtgatttataacaaaaaatgaaagttgagaatatttcgtaaatacgatttcaatagaaaatactcagaaagtttataaatacttgaaagattgaaatatgttggaaaaaatttgagatacaagttattttatatttaactcaatcactttaagagctttagataaactttgttttaaaaaagattcatcgtttgcaaaagatataaaaataaaaattgacaaaaaatttcttaatgagtttaaaagtcatgactgaaaaataatagaagaaataaaatcaaaaaatcaactgatagaagaaaatgagcttttaaacttttataacgaagttttcgaagttcaaactactttatgaattatgtatagagatggggaaacatctcaaaatattttaaaaaattcacaagatgaagaagaatttgagataaatctaaaacttgaatgttatgttttagatgaatttaaaacaaatcaagaaaaaattgataatttactaaaaaataataattgaaactcttataaaataacttcttgggatttaaggggaaaaagagaaaaacctgaagaacacacaaaatggtggtttaagttttgggattctaaaaatgaagaaaataaatttcctttaagaataaatccagagattagcatttcttatgtagaacaagataaaaattttaaaaaattaaaaccaaatcaaacaaataatagaagaacaagagaaagatttttacttgtaacaactttatctcataaagcgaattcaaagtatattgatagtgcttttacattagataaaaaacaagaaaatattgatatagttaataatagtttgaaaaaatatgattatttttattgactggataaatgaaccaatgaacttataactttatgaatttataaaaaatgagaaaactgaaaaatagaaccagtaaatatttctgaaaaaatagaagtttataaaatcaccgataattgattaaataaaacaaaagatgtaataaataaaggttgaagtataaaaactcatattttatataaaaatccttcaaactttttagagtttataaatgataattctatttttgaaaaacaagaacaagaaaaaaatattatttcttgtctttgaaatctgacaagtgcaaaagttattgataaaaaaattattttaaattgagatgtaaatactataaaaaaactttatgaaataaatgcaaaaagatttatttatatatttattcaagaacaatgaaaatctgatgaaaaaattatttttgatgataaagatcaagtttttagatttggttgaaaatgaatttattattataatgaaaatgtaaaaaattttatttcgaaagaagaaatagaaaaaaaattaaatgactatattttacaaataaaaaattttgatccaaaaaaagacgaattagaagatatttctataaataaaataaatcatttaaaaaatgccgtttgtgcaaatatagtttgagttataatgagattacaagaaatagatttatttccttgatatattgtttatgaaaatttaaaaatttctactagtaatagtgatttagaaaaacaaaacacttttctatgaaatcttataaatgaaaaaatttataataaattacaattaacaaacgaagttccagcaattttaaaacagtttagaagtgatttagatgaaaaagatataattcaacattgaaagattatttatataaataaaaactttacttctacagcttgtccggtttgtaatgaaactctgacaaaaactgaaaattgaaaagtggttgataaaaaagataatgaaataaataaattatgatgacatatgtcagactttgaaaaaaaaatgacacacttaacagataaagaatatcaagattggctaaaaaatgaaagtttcaaaaaagctaatatgagtaagtgaaaaatagataaaaataaatatcaatcttgaaatataagatgaaaaacttgtgagtttcatttacaaaattcaaaatatctagaatttaactttctaacttcttgagacgacctagcaacttacaatatagcaaaaaaatgacttgaatacattaaatctttaaattaa

SEQ ID NO: 279 - DNA, 3522 bp, Unknown
  metagenome-derived sequence
  misc_feature (1)..(3522): Unk112 native DNA (opal coding; TGA>Gly)
atgggagagtttaggaatgtttttgaagttagaaagaatgtgaggtttgagttggaatctaatatcttattcagagatttgaaaataaattctaattgtgatgatgaaaatttattgaagagttttaatgaatcatataaaagttttatagaattacttttacaaaatttttgtaaaagaaaaaatattgttacagaaaaaaaagaagtatgaaataatatttttgcaaatgcttttaaaaaggcttgaataaatgtagaggaaaatagtaaagaaaataaaaataatgaagaaaaatatgaatatgaatggtttaaaacgattcaatttttacataagtgacttgaagaattatttataaatgattttatagaaaatagaaaagaaattaaatatgatagaaatgggaaaaagaaacaacataattatataaccttttgagatttatgagataaaaattttattaagattttttttgaaaacttttttaaagaaatagatgtaaatttaaaagaattaaagtattttgtaactacttgattagagaataaatcaagaacatcagatatattatttttagttcaaaagataaattcaagagaacatttatgaaaactttatactatgtttgaaaaaaattatattcaacataagaatgattcatctgttattgaaagattaaagatttctattttaaatttaaaagaaaatatagaaaaacttttaatcgaattaagaacatcacaatctttttgaattcctatagaacatgttagtttgaattataattcaattaataaaacagaaaaagaaattacaaaagatattaaagaagtattaaaatgaaataatttaaataaaaaatataaatggacttttgaaaaaaaagataatttggagaaaaatgaaaaaagtataattaaaacttttaatttaaaagaaaaagattctttgaaattaatacaagatgaattaaatattgaaattgatataagtgaatttaaagaaaaagtaaaactttttaaagctaagcaaaaagcatgatttttacaattattacaaaataaagtaccttttgaagattttaaaaattcttttaattttgaatttatgtgagaaaattttaatgattttagaattactcttttttctgatatatcaaaagaaaattatgatgaaatgttaaaattaacaaaaaaaatagaacaagaaagtgataaagaaaatagaaaaaaattaaaaatgcaaagatgaaaattttttcaatttagattaaaaaaatttaaagacttttctgaaaattataaaaaaattgctcaaaaatattgaagagatagtacagaaataaaatccttagaaagacaaaaaatagatgctataaaattgagatgatggtgatttttatcaaaagaagataataattattttataaatacttttgatgttgataattcaaaacaagtttataaggaaattaaaaatcttcaaaaagattgaaatgatataaaaatttatactttatcttctataactttaagagctttagataaattgtgttttaaaaaagattcaagttttataaaacatattaatacaagagattttaatgaaagagtttcacttgataattgaaaaagtttttggagattaaaaaataaaactactcttttagaagaatgaagacttatgaatttttatatctatattttagagaatcaagttactttaaatataaaatataaaagtaaaaattctttgaatatattaaaaaattcaaaagatattgaggaatttgagattaatttaaaattagaaacttatgaacttatagaaaaaaatatttcaaaacaaacttataaaaatattttaaataattataaatgaaattcttataaaataacttcatacgatttagaaaagtgactagaaacaaaaaaatatacaacttggtggtttaatttttggaaaaaagaaaataaaaatgataaatatataattagaataaatcctgaattaacaatctttttcaaagaaaaaaataaagattttataaaagaaaattctgatattaagaaaaataggagattagaagatagatttatattatcaacaaacttttcttttcattcaaataaatcttatatagattcagcttttataaatgatgaaaaaagaaaaaatagtatagaaacttttaatgaaatatttaattgaaaaaataaattagattatttttattgattggataaatgaacaaatgaattgataactttatcaatttttagaaaaaattgagaaaagattgaagttgtaaatataagtgagaaaataccagtatatagaattacaaataaatgattaaatcattttgagtatataaaagataaaaaaacttgagaatgtattttagatgaaaaaacttgagaaaagaaaaaaagatttttatcaaaaaatgtttcatattttataaaagatttacaaaataaagaattatttgaaaagttggagataaaatcctgtttatgagatttgacatatgcaaagcttattaaatgaaatattattttaaatgctgatatatttacaactttaaatttatataaagtaactgcgaaaagatttttaaatgatgcaattacaaaatgaaatatagaatcagatagaattttatataatgaaagtgataaaatttattattatgaatatttaaatagatgaaataaatatacaaaagtaattttgtattggaaagatgaatttgattttttaccttataaagaagaaaaatttaatagtttaaaagaagaagtagaggatgaattaaatcaatatataaaagatataaaattatttttacaaaactcaaaaaaatataataataatgaaaatatatcaattcaaaaaataaataattataaaaatgctatttcagcaaatattgtttgaattattatgaaattacaagaatattttaattgatatatttgttatgaaagtcttgatgaatgacaaattttaaaaaagtgattaagtacttttatatgaaatgtagtaaatgaaaagatttacaatagattagaattaaatttagaagttcctccaattttaaagaaatttagaactgatatttgatgaaagcagataattcagcatgggaaagttatttatgtggatgaaaataatacatcaaaggcttgtcctagatgtaatgagtatttattaaaaaaagataagaattgaaatttaatagaaaaaaaaggtgattgagaaattaataagttatgatgacatttaatgtgagaaatatgggaatataatatgcatcattgtgataatcctaaaaattgtcctaatattgaaaatcatatatcaaaagaaaataaagcaaaatgtgattatcatatgaaaaataataattattgatttgattttattaaatcttgagatgatctagcagcatataatattgctaaaaaatgattagaatatataaactttataaattcaaatactacttcttag

SEQ ID NO: 280 - DNA, 3360 bp, Gracilibacteria sp.; identical to SEQ ID NO: 251
  misc_feature (1)..(3360): GbCms1 native DNA (opal coding; TGA>Gly)

SEQ ID NO: 281 - DNA, 3474 bp, Candidate Division CPR1 bacterium
  misc_feature (1)..(3474): ADurbCms1 with TGA codons modified to GGA
atgttaaaaacttttaaaaacttttatgaggtaaggaaaacagctagtttcaagctaattcctaataaaatttatagacaaattgaaatgagtaaagaaccttcaaattttaaagatctgggaaaacaatatgttaatataataaattctttatcagagttattatatgaagatgaacatgaagacaatactgaagaagtaggattgtctacaaacttaggatcacttatatcccaagatgaccaattaaaaattggagaaataacaaaatctgcaaacaaatctgtcgaaaatcacgagcaaataattttacatggagatgaaaaggattttgataaaaaggattttaataagcttgttagaataaaacatcaatggattaaagagaactttagaagtgattggcataaaaataaagaaaacattgtttcttacaaaaccaataaagatggaaacagagttaaaacaaaaaattggactattattggaaatgtggagtttttacaagttttttttaaagactttttaaaaacagcactagaatatggaaataatattatagagttaaccgaatcacaagaacacgataaaagtagaaatagtgatataaaatttttactacaaaaaattcaatctaagttacacttaaataaaatttatcaattatttgaaggagaatatataaatcataaaaatgataattcagatatcgaatatttaagagagcaacttagagactttaaacaaaaagctaacaattgtatagaaaactataaaattagtgattcgtttggaatgtttatagaacacggaagtcttaattattatacaagaagaaaaacacaaaaagattatgaagaagaaattattaaaaaatcggaaggattaaaaaacaaattttatggaaatttaggagcactttatggaattgataaaaatcaacctatagaaaatctttataaagaaatgaagatttttaaagcaagtcaaaaaagtgcttttttgcagagattacaaagtggtattaattttactaattttcagaaggaatttaaatttattgataatagaggagatgttgttgaaaactttaaaatagttttgttctctgacataacggaagataggtatgaagaaatgttaaatttaaccaatcaaattgaaaaagaaaaaaataaagaatctagaaaacaattaaaagaaaaaagaggaaaatattttcaacatcatcttaacaaatacaaaaaattctgtaatgattataaagatgtggcaatggagtttggaaaaaggaaagcggaaattatatcattacaaagagaaaaggtactcgcagaaagggaaagaggatacggattctttgccaaagatggagaaaacaatttctatataaacacatttgatatagaaaactcacaacaagcttatcatgaactaattaacaataaaaatacaaagggagaaattgcatattatattctaagctcgataactttgagagcattagaaaagctttgtttctcggaaagatcaacctttagtaaaggaaacataataaataagcttgatgaaaagtttataaaaattcaaaatggaagtggaagaaaaatctttaaaagcaagaaagaactagaagaggagaatatccttattgatttctttgtagaagtactaaaacaccaaactaatttgaacctaaaatttaaatctactcaatctataaacatactaaaagagtgtaaagatatcggtgcatttgagattttattaaaacaagaaacatatatattagatgaatattttatttcaaaacaaaattttgaaagtattttagaaaaatataagggaatttcatataaaattacctcaaaagacattgagaataacactaataaaagtactttctctagttggtggagagatttttgggaagaagaaaataaagaaaatgattatgtattaagaataaatccagaattcagtatttcttttaggcttggagataaggaaaaatataaaaacacattaccatttcataggaaaaaaaataatcaatattttttaactatgagtttttctcattctgctgatagaaattatattaatactgcctttattaacgaagaagatagaaaacaatcattacaagattttaatgatatttttaatagaaagaatagatttgattatatttatggtatagataagggaacaaaagaattagtgaccttaggaatttttaaaaaatcaaacaaaggattggaatcagtgaatatttctgaaaaaattcctgtctacaaaatcacaaaagatggatttcttcatactaaaacaacgacaaaaaaacaacctaaaaaaggagaacaacctattacaatacacacattagctaaaaatccttccttgtttttagatgaaattgataatccaaaaatctttgaaaaattaagtattacttcttgtttaggagatttaacttatgcaaaacttataaaaggaaaaattattcttaatgcagatatttccaccacccttaatttatacaaaactacagcaaaaaggtctttgcataatgcagttacaacaggaaaaatgatatctaaacaagtattgtatgataatgaagaaaatgttttctattacgagtatgaaaatagaggcattttgaataaagaaaaaaatttgtattggaaagatgaatttaattttttgcctcacaaggatgaatttaattcattaaaagaagaaatagagtttgaattaaatgagtatataaaagatataaattctgaagaagacatatctatgcaaaaaataaataattacaaaaatgctgtctcagctaatattgtaggaatcattacagagttacaaaaatattttgagggatatatctgttatgaaaccttaaatgaacaaacagtcaaaaaggaatttgatacttttataggaaatgttataaacgaaaaaatctataataaattacaattaaatttggaagttccacctattttaaaaaagtttagaactgaagtcggaaataaagatattattcaacatggaaaaatattgtatgttaatgaaaaaaacacttcttctgcatgtcctgtatgtaatgagcaattattaaaaaaagataaaaatggaaatctatctgataagaacgataatgaaatttttaaattaggaggacatttaagtgattttgaaaataacatgaagcatttaacggatctagaatatcaagaacggttaaaaaataaaagttttgaaaaggctaatactaaaaaaggaaaaatagaaaaaaataagtataattctggaattttaaatggaaaatcttgtgattatcatatgaagaaaaacaattatggatttgattttatagaatctggagatgatctcgcaacatacaatatcgctaaaaaagccaaagaatatctagaaagtttacctactcctcctcaaccttaa

SEQ ID NO: 282 - DNA, 2721 bp, Unknown
  metagenome-derived sequence
  misc_feature (1)..(2721): Unk14 DNA with TGA>GGA
atggagaaaaattataagagtgaaatcaatttatcttatgaagacattctaaataaatttaatttattaggaagagctattgatatcgcaaatgattttaaaaattccaataatcaaaataacttttctcttgatgaatatcctataaagttagcctttgattatgcttgggaaaatacagcaagaagcttgaaaagaactatacctttccccaaagaggtatgtaaacaatttttaaaagataattttgatgttgatatcgataatgcagattttaaattatatgccaatcttttattcatagcggataacctagcaactatagaatataataacccaaataatgaagtagaacttataaatgaaataaaacaagcatttgaatgcattagctttccttttgataaagaagtatataaaggacataaagaagctattttggaattattagataaagaaaaatctcaaagagactattccactatattaaaagcaaaacaagaattgggattattgagaggaggattgaaaaataagattaaaaaatacagagatttaacacagagattaatagacaaaaagaattcacattttggaatcgcgagttttgtgggaaaaacacttgctacaataagagatggtttaaaggaagaaaatgaactaaataaaattagtgattacggagtaattattgaggatagtaatcaagataaatatctacttactctagagctaaatgggaaagatataagagatagaattagaaatagcctaggaaacggagaatataagacatatgaagtaaattcctttacttcaaaagcattaaataaatttatcaaaaatcctttatcagaagacgcaaaaaaatttcatgggaaatataaggatgaatatagttttggatatgaaaataaagatggagatttcacttataaaataacaaaagtttcaaaatatgatgaacaaggaaaatggacaggataccaggaaagttttttaagtcatataaaaaagtgtttaattgactctgagatttcaagagaacaaaattgggaagcctttggttggaattttgctggttgtaatacttatgaagagatagaaaaagaagttgattctaaaggatatcagttgactgaaaaccttatttcaatggggaatttaaaaagcttggtaaaagatgaaggttgcttgttatttcctattattaatcaagatatttcaagtcaaaaacaagaaaataaaaacatttttactttagaccttgaaaaggtatttgagggaaaagaatgtaggattcatccagaattttctatcttttatagaaggccaatagaagaacacaagaaggagaataaatcaggaatcataaatcgttttggaaggttacaattattggcaaatcttggtatagaatttgttccaagaaatccttcttttaaaacaaagaaagaacaaaatagaattgcgattgatcaaaagaagcaaaatcagttagtgcaagagtttaaccaaaaaaaagtaaatacatattttgaaggattagataattattatatttttgggatagatagaggaatcaaacaactagcaactttgtgtgttactgataaagatggagttatacaagattttgatatttatacaaagcactttaatagtgaaagtaaaaaatgggaatacaaatttcatagaaaagatggaatattagatttaactaaccttaagattgagtctgatagaagtggaaataaatacatagtagatatatctttatttcaagctaaagatgaagatggaaatcctacaggtacaaataaacaaaatatccaacttaagcaacttgcatatatcagaaaattacaatatcaaatgtctgcaaatgaagaaggagttttaaattttttgggaaaatataagaacaaagaagaaagagaacaaaatatggaagaactaattactccatataaagaaggaaaaaattttgcagatttaccaatggatatttttcaagaaatgtttgaaaattattatagattaaaaactgatcaaaatttgtctgaatctgagaagaaaaatcttatgaagatcactacagagcttgatgcaagtgaaagcttgaaaaaaggagtagtcgcaaatatgataggagtgatttattatttgatgaaaaaatatgaatataaagtgaagatttctcttgaaaatctttcaaatgcttggcttttttcaaaagacggactttctggagatgttgtgctaaatacgaaaaatgatgaaacaatggatttaaagaaacaagataatctagcgcttgctggagttggaacatatcatttctttgagatgcaattattgaataagttatttaaaatttctaccgaagaaggagttttgcatttagtcccaagttttggaagtgtaaaaaattatatagagattatgaagataaaaggaaaatatgtatacaaacaatttggcattgtttatttcgttgatccaagaaatacaagtaaaaaatgtcctgtttgtggaaagggaggaaaaaaatatatctcaagagttgacaatgttgtaacatgtaagaattgtggatttgatacatcatcagacaattccatccttataaataattataaaaaacaaggaaaaaatattcattttataaaaaatggagatgataatgcagcttacaatatcggagagaaaatacgttaa

SEQ ID NO: 283 - DNA, 3393 bp, Unknown
  metagenome-derived sequence
  misc_feature (1)..(3393): Unk23 with TGA>GGA
atgatgaataatattgaaaataaaaacttatatgaagttaggaaaactgttagatttgaacttgaaccacaatttaaatttaattatgaaaataaagatattgtaaataataattttgatttaaataattttattgataaatatagtagttttttaaaattatttaatgaaatagtttttaattttaatggagaaaaattaaatggaaaattaaagataaaatacagctttttaaagagttatacaaaaaatcaatattatgataataaaataattaaacctttaaaattagttaatcaagttgaaataggaagttctaaaaaatttgaatatttgtttcaaactttttctgaattgtataaaaacaactttgatattttaaataatataaaagaattatcacaaagaagtttagaaaatcaatctagaaaatctgatttagctgtttattttagtgaattatcaaaaagaactaattttgtatttttatatgaattatttaataatagtttaaatattgagaatgatgaagtatcagttaaaattgataaagcaaatattttaactaaagagattgatgaacttataaaaaaaattaaaaaatcattattaccaactgaagtaattgaaaaattaagtttcaattattatacagttaataaaagaaaaaaagattatgataaagagatagaaaataaaataaatgattttagtatacaattaaaagattttaatccaattttaagtatcactcatagtggatttaaaaattatatttctgatattgctgaaaaatcaacattattaaccatagttgatggatacaatttaatgaaaaaatataaagctgaacaaaaatcaaattttttaaaatatttatactcaaaatctagaaatgaagattgtgatttaaatattgatttattttctgatattttaataaagcctgaatttaatgaaattttagacttaacaaaagcaataaatattttatcacaagttaaaactgatattttaaatctaaaagaagctaatgataagaataagaaaaattttgaaattgaatcaactttagaaaaatataataataattttggaacagattttggaaaaattgaaagagataatttttttgaaaaaattactaaacttaaaaaattaagaggagattatttttttgaaggaaataaagaaaaatttaaatttaatgactataaaattttttgctcagaatataaaaaagttgcaaaggaatatggaaatattaaagctaaaattaaagctttacaaaaagaaaaaattgatgctgaacaaactcaaagttgggctttgattctagaagaaaataataataaatttttacttacaattccaagagataatacaaataattctgaaaatctatctgaagcaaataagaaaattaaatatttgccttcagataaaaatggagatatttacttaaatatatttgattcacttactttaaaagccttagataaactttgttttggaaaagaaaataatacttttagaagaactatatattttaacaaggctgaatatccagaattttttaatgataaaggatttttaaaagataaatttgaattttcaaatttagtaaatggacaaaaaattaatgatgaaaaattacttataaaattctataagtcagtattggctttagaatcaacaaaaagacaaattagtttaaaattttttactggaattgaagattttttacaaactaattttgatactttagatgaatttcaggaggaactaaaaaaagtttgttataccattattagaaaaactataacaaaacaaacaaaggatgaaattataaataattatcaaacaaaactttataaaattacaagttatgatttaaaaaaatatgatgaagattttataaaaacattgaagtataaatcagatttaaaaagaaaaaaaataaataatcatactcaaatatggcttgatttttgggaaaaagaaaataaaaataataaatttccaacaagattaaatcctgaaataaaaattagttttactcagttaaatctaaagtttattcaaagtaactctgaattatttacaaatagacattttggaaatagacttattttaacttcaagttttactcaaaatgcttttggaaaagatttagatttaaattttaaagaaactcaagatataagtaatttttatgaaaaatttaataataattttaataaaaacatcaagccaactttaaaatatagttatggaattgatagaggagaaaatgaattagtaagtttgggaatttttgatttatcaaaagataaaccagaagaaaaaggagtcaaaatacctgtttatgagttaaaaactgataaattttttgcatatacaaaaacaacttctactggaaaaaatatgtttccatatcaaaatgtatcgtattatcaatatgaagattttccacattattataatgaaattaaatatgtttcttgtctagatttatcaacggcaaaacttattaataacaaaatttatctaaatggagatattcaaacttatttaaatttaaaaatagtttcagcaaaaagaaaaatttatgaaataatttcaaaatcacaacataaatctgaaagtttagattatgatgattataatacaatgatttatattgatggaattaaagggaaaaataaacatatttataaacataattcaaaatatgaaagtattttaagttttgattttgtaaaagatgaacttaaaaaatatattataaaagtaaaagttgatttaaatgataatgaggaagtgtcaatccaaaaagtaaatcatctcagagaagctttgtgtgccaatatggtgggaataattgattttttacaaaaaatatatcctggaatgatctattttgaagaaaaaaatgaggatgatagaataaatcattttaatataagtaattctagtttaggaagtaaaatagagctaaaattattacaaaaatttgcttcaaaaaattttgtaacaccagtttataaacaaattttaactataaaagataataaaaagtataatattaaacaacttggaattattggatatgttgatgaaaaaaatacttctgattcatgtccaatttgtggaagtaagttatttggacatggatcttttgaatttgaaaacttaatgcatcattatactgaaaaatatggatataattacggagatagcttagataaagctaaaaaaactacatatgatatttgtgattatcatatgaacgataaaaattatggatattttttcataaactctggagatgatttagcaacttataatattgctaaaaaaggaattgaatatttaaactctaaaaaataa

SEQ ID NO: 284 - DNA, 3501 bp, Unknown
  metagenome-derived sequence
  misc_feature (1)..(3501): Unk24 with TGA>GGA
atggaaaataataatatgtttaataatcttaaaaatctttatgaattaagaaaaacaattagatttgaactagaaccttatatcataaaaagaaatttaattccagataataatgttaatgaaaatttattgaaagaattttataattcatacaaagactttataaatctacttaaaaagaacttttttaatgataaaaatataataggagaagaagataaagatattgagaataaaccttttgcaaacttatttaaaaaagcaggaataaatatagaaggaaacaatcaaagtggaaaccaagatattgataaagatatttatgataattatgaatggtataatacaattcaatttaaatataaatggcttgaagaagtatttctaaatgaatggatagataataaagaaaaaatcaaatataaaaatggagaaaagaaacaaaaaaattatattacttttggagatttaggagaaaataattttgtaaaaaagttttttataaaattttttaaagatacagatagtaatttaaaatctttagaacaatatttaaataatggattagaagatcaaacaagaaggtcagatatattatttttaatacaatctataaattcaagagattatttaggaaagttatatatattatttaagaaagataacattgaccataaaaatgattataatattattaaagaaatgaaagaatctattttacaattggaaaaacttataaaacaacttttaaataaacttaaacctagtcaagcatttggacttcctatagaacatataagtttaaattattattcagttaataaaactcctaaagaaattgatgatgaaataaaaaatgagcttaataaaaagaataatatagataaaaaatatatatggacttttgaagacaaagataatttaaaatcgatgttttttaaaagtacagacaaagaattggaaaaagaattggaaaaagaattaaaccaagaaatgagtttaaaagaattaaaacaaaaaatcaaactttttaaagcaaaacaaaaagcaggttttttagaattattacaacaaaaaactccttttaaaaatttcacaaaaccttttgattttaaatttatgggagaaagttttgaaaaatttaatcttgttcttttctctaaaattaacgaagatacttataataaaatgttaaaattgacagaagaaattgaaaaagaaaataataaagcagaaataaaaaaattaaaattgaaaagaggaaaattttttcaacgggaattaaaacaatttaaaggattttgtgatgcatataaaaaaatagctcaaaaatatggacaagctaatgcaaaaattaaatcacttaaaagtcaaaaagtagatgctgaaaaacttagaggatggggatttttatcacaaaagaataatgattattttataaatacttttgatattgaaaactcaaagaatgtttttacaaaagaaataaaaaacttaaaagaaaatggaaaagatgttgttatctatattttatcttctttaactttaagagcattagataaattatgttttaaaaaagattctagttttattaaagaacttattaataatattgatgataaatttatcaatactaataataaatataaaaaattaaagtctaaaaaacaacttttagaagaattagaagaaggagaacttataaacttttatattgaaattttagaaaaacaaaaaactttaaatatcaaatatagaactgaaaaatctttagatatactaaaatcatcaaaaaatttagaagaatttgaaataaatttaaaacttgaaacttatcattttatatcaaaaaaaatatcagaagaaacttataatagaatattaaaagaatataaaggaaattcttataaaataacttcttatgatataaaaagaggaaaacaaacaaaaaaatatactacttggtggtttgatttttggaaaaaagaaaataaatataataaatatattactagaataaatcctgaaatgacaatttcttttaaagaaaaagataaaaactttatagaagataatcctgataaaaaaagaaatagaaagtttaaaaataggtttatattagctactaacttttccttttatgcagataaatattatatagattctgcatttattaatgaagaaaaaagaaaaaatagtatagatagttttaataaattatttaatcaaaacaataaacttaaatatatttatggattagataaaggaacaaaagagcttataactttaggaatttatgaaataaaaggagaagaattaaaacctgtaaatatttctgtaaaaattcctttgtataaaattacaaaaaagggatttaaatattttgaggagatagaaaataaaaatggagaaaagaaaaaaagatatttagcaaaaaatgtttcatattttataaaagatttagaaaataaagaattatttgaaaagttagaaataaattcttgtctaggagatttaacttatgcaaagcttataaagggaaatattattttaaatgctgatatattcacaactttaaatttttataaaataactgcaaaaaggtttttaaatgatgcaattacaaaaggaaaaattgaaggagaaaaagttttttatattgaaaaaaataaaaatttttattataattatgaaaatagatcagaaatagaaaaaaaagttataatttatcggaaagaagaatttgattatttaccttataatgaacaatattataatagtttaatagaagaaatagaaaatgaactaaatagttatattaagaaaattcaatcatctttaaataattcaaaaaaacatcatgataatgaagatatttcaattcagaaaataaataactataaaaatgcaatttctgcaaacattgttggaattattattaaattacaagaacattttaatggatatatttgttttgaaacacttgatgaaggacaaatacaaaaaaaaggattaaaaacttttattggtaatataataaatgaaaaaatttataatagattacagttaaatctagaagtgccacctattttaaaaaaatttagaactgatgtaggaaataaaaaaataattcaacatggaaaagttatttatattaatgaaagcaatacctcaaaagcatgtcctatatgcaataaaacattattagaagtagataaaaatggaatactaaaagaaaaagatggtaaagatgataataaaatttataaattatacggacatttaaagagaaaaaatgaaaataaaatgcgtcatttatcagataatgaaaaatttcaacctggaaaaatagaaataaacggaaaaattgaaaaaatttgtgattataatatggaaaaaaataattatggacttgattttataaaatctggagatgatcttgcaacttacaatatagctaaaaaagcattagaatatttaaattctaaaactaataattaa

SEQ ID NO: 285 - DNA, 3630 bp, Unknown
  metagenome-derived sequence
  misc_feature (1)..(3630): Unk32 with TGA>GGA
atgttagaaagttttaaagatttgtatgaggtgaggaaaacagttaggtttgaattaaagcctagtaaggtacttcctaaaataaaaattaaaaatatagatgaaaactttatcaatgaattcttttctaattataataagttattagaaatttatgaaaaagtattttttaataatagagaaattaacgggaaaataaagtttagtttctcttttctaaagacaaacttaaaaaaagaatattatgagcttggaattgacaaaataaaaaagtcagcctctgttaacaaaataaaattagaaaaaatagacaattatgagaaattaaatagttcatttttatctacattaaaaaaacaaaatgaatatgtaaattcttttaaagaaaaaatagaaagtccttatgagaataggagtagaaaatcagagttagttttattaatatataatctaaaaaagagaaataatttccctttcattgagaacgcatttaataatgtaacagcagaaaacataatggttgatgatgaaataaaaaaaggaaacatgttagccaaaactatttccaatcaattagtaactattgaagaggaactattacctcaaaattcaatgggattagtaattgaaagagcaactttcaactattttacaattaacaaaacacctatagattatgatatagccataaaaaacaaaaaaaataaatataatgagattataggaaagcaaaataaattaaaaaatacgtacaaaaaacaatctataaatgaatttataaaatatattatagaggatggctttagtaaatttgagaatcaaatatatgaacaaaatgggaaatatattgatacagggagaaaaggaagttcttttaacgaattaactatagaaaatgcttatacattaatgaaaaaatataaatctgaccaaaaaacagctttttatgaaataataaaaaaagagaaatataattttttaaaatcacaaaataataaaataacaattacatataacaaagatagctttaatgataaaaaagaagaaataactgtaaaactttttaatgatataagtaagggaaattttgataaaattgcaatgttaacaaaaaagatagaaactcttgctgagcttaaaaattatttagagaaaaaagaatttaataaatttcaagaaaaaataaatactttacaagaaataataaatattaattttaataatgataatgaggaagaagtagaaaatctagtaaaaagacttaatgctgatagagttttattaaaaaaagaaagaggaacttattttgataaggaatctaacaactttgcttttacaaagtacaaagaattttgtgaagtatatcaagaagttgctatgaccttaggaaaagcaaaagcagatataaaatctttagaaaaagaaaaaattcaatctttatttttaaaatcttgggctcttatagtagaaaataaagaaaaaaatcaattccaccttttaactatacctaaaaagaacatatcaaaagcaagaaatattatattggcacttaaaaatggagagaataacaataatatattatatctttttgaatcattaacattgagagcattaaaaaaactatgttttggaaaagaattttctgaaaatagaggagattatacagagaaaagttcaccctttagaaaaagcattgaagaaaatattactaatagtgattttgataacataaatttttatatagaaaaacaaaaaaaagatggaaacaattatagagtactaaagcaatattatgatttttacataaataaagaagaaaacaaagaattagatgaagaattgctaattaaattttataaatcagtgttacaactaccaagcacacttgagcaaataattattaaaaacttccctgactatgaaagtttcatatctaaagaatttaataacttagaagaattcgaagaaggtataaaaagaactttctatataaaacaacctcttaaaatagaagaacacaaattaaataaattaataaaagaatacaattggaatttatataagataactaattataatttaataaaaaatgatttagatgaaataaaggaattaaaagaaaaagaaaggtttaacagaaaccatataaaaaatcattctaaattatggtggaatttttgggaaaaagagaatatagacaataaataccctataagaattaaccctgaaattgctattagcttcgttaaaaaagatgataatttttatgaagaaaatcataacaaactttttaaaaacagaagatttcaagatagatttctattaacaacaagcatgacagaatttgcaacaaataagtcaatttatttaagctacaaagagttaagtgaactaaaaaatttttataattcatataattataatttttcagagaattttaagggagaatacatttatggaatagataggggagataatgaattagcatctctaggattatttagaaatataaacaaaaatatagaagcagtaaaaatagaaacatataaattaaaaaatgaaaatttactttttaaagagggaacaagtaatactcctgcttataaaaatatttcaaattatattgaaaaggatgagttatttgaaataaaagaagtttcttgcatagatttaactttagcgaagttaataaagggaaaaattgttttaaacggagacatatcaacatatattaatttaaaaattactgcagctaaaagaagtttatataatatattttctaaaggaaattataaagaaggagatataatagaaaaaggaaaatttaaagacaaaaatactggagaggaaggatatgatggaactcttaagtttaaccaaaaagaaatatataaaaataatagtgaaattgaaaaaattatatcaattgataaggtaaaaaatatactagaggaatatattgaagaaattaagcaaaatatttataatgaagacatttctattgaaaaaattaatcatttaagagattcaatatgttcaaatatgattggtataataaatttcttacaagaaaaatacagtggatatatgtttttagaaaacaaaaaaataattgactcgaacaaaaactttctaaaagatggataccaacttggaacaagatttgaacaaaaattgctacaaaaattttcaaatttaaacttagtaccttcaaattataaattatttttatcaataagagatgaagataaagaaataaagcaattaggaataattagatatatagatgagaattcaacttcttctgcttgtcctgtttgtaatcctaaattatataatgtaaacagtgatgatataaataaattatatggacatggaaaaggagaagagaaagaaaaatcaatgcatcatatcaatgataaaaatgatgaaaaccatcaagaaggaaaatgggaatctggaaaactagaaagcggagatttatgtgatttccatattggatataatgaaaagtatcctgattttagtttcatcaagtctggagacgacctagcaacctacaacatcgcaaaaaaagccttggaatatttagaatacctaaaatcactaaacaacgatgaaacaaaataa

SEQ ID NO: 286 - DNA, 3948 bp, Unknown
  metagenome-derived sequence
  misc_feature (1)..(3948): Unk37 with TGA>GGA
atgattaatttagaaaattttaaaaatttgtatgaagtgaggaagacagtgaggttcggattaaatcagcctaacaaaaaaggagattttaaaactcatttagaatttaaagattttactgaaaagtcttttcagaatgtcgaaaatgagctagcatcaaatggtaagtataatatcggtgatgaagaacagcttattaaaaaaatatctgcttttgttgaacaactaaaaattcaactaggatactggaaagttttttatcaaagatatgatttaatagctataaataaagactactataaaatattggcaagaaaggcaaaatttgatgctatctgggagattagtaaatcaaataaatatataaaagttaaacaacctcaagcaagtcaaatttctttatcatcattaaagattggaaataggagtgatagtattattcaatattggggagagataattgagaaaacagattatttactcaatatttttaaacctaaattagaacaatacgagagggctattaaagatgctaataatgctcatattaaacctgatagtattaactttagaaaaacctttttacaacttttgaaactaactaaggaatttttacaacctttatctgacagatcaattatttttgagttttcaaagaagaaagtttctaaagaaattgaaaagatttctgagtttgctggagaaaaaaataatacaaaaatttataatgtattgaaaaatggagaagaacttagacaatattttgaagcgaatggatcccaagtttcatatggaagagtaagtctaaactattatacggcggtacaaaaaccaaataattttgatcaagaaattaaaaaatctatagacgatttaggaataataaattttttgaagaaaagtgatagtcaaattatcgattatcttcatcaaggatcaaaacagaaaataaaattgttacttacttcaaaacatccttatcctattgagttattacagttatttaaagtaaagcctattcctttttcagtaaaatataatttggcaaaatttgtagagaaaaattataaaagtgaaaccaatttatcttatgaagacattctaaataaatttaatttattaggaagagctattgatatcgcgaatgattttaaaaattctaatcataaaggcaatttttcccttgatgaatatcctgtaaagttagcctttgattatgcttgggaaaatacagcaagaagtttaaaaagggatatttctttcccaaagaaagtgtgtgagagatttttaaaagataattttgatattgatgttgataatgcagattttaaattatacgccaatcttttattcatagcggataatctagcaactattgaatataataatccaaataatgaagcagaacttataaatgaaataaaacaggcatttgaatgcatgagcttttcttttgaaaaaaaagtatatgaaggacataaaaaagctatcttggaattattagataaggaaaaatcccaaagagactattctactatatcaaaagcaaaacaagaattgggattattaagaggaggactgaaaaataagattaaaaaatacagagatttaacacagagattaatagacaaaaagaattcacattttggaattgctagttttataggaaaaacacttgctacaataagagatggactgaaagaagaaaatgaattaaataaaattagtcattatggagtgattattgaagataataatcaagataaatatattcttatatcaaaacttgaaggaaaagacagaagagataagattgttcaaaagcttggaaagggagacataaaggtgtatcaagtaaattcttttacttcaaaagcattaaataaatttatcaaaaatcctttgtcagaagacgcaaaaaaatttcatgggaaatataaagatgaatatggttttggatatgaaaataaaaatggagatttcacttataaagtaaaaaacgtttcagaatatgacgaacaaggaaaatggataggatatcaggaagaatttttaaatcatataaaaaagtgtttaattgattctgagatctcaagagagcaaaattggacggcctttggttggagttttgatggttgtaataattatgaagagatagaaaaagaaattgattctaaaggatatcagttgaccgaaaattctatttcaaaggggaatttagaaagcctcgtgaaagatgaagattgttcgttgttccctatcattaatcaagatatttcaagtcaaaaacaagaaaataaaaatatttttactttagattttgaaaaagtatttgagagaaaagaatgtaggattcatccagaattttctatcttttatagaaagccaatagaagaacacaagaaggagaataaatcaggaatcataaatcgttttggaaggttacaattattagcaaatcttggtatagaatttgttccaagaaatctttcttttaaaacaaagaaggaacaaaatagaattgcgattgatcaaaagaaacagaatcagttagtgcaagagtttaatcaagaaaaagtaaatacgtatttcgaaggattagataattattatatttttggaatagatagaggaataaaacaattagcaactctatgtgttactgataaaggtggagttattcaggattttaccatctttacaaagcattttaaccaagcctctaaaatatgggaatatagagaaaatagaaaggaaggaattcttgatttgacaaatcttaaaattgaatctgataaaaatggaaatacttatatagttgatatttcattatttgatgcaaaggatgataatggaagatctacaggaacaaataaacaaaatattcaattaaaacaacttgcatatattagaaaattacaatatcaaatgtctgcaaatgaaaaaggagttttggatttcatagcaaaatatataagtaaggatgaaagagaacaaaatataaaagaactcattactccatataaagaaggaaaaaaatttgcagatttgccaatggatatttttcaagaaatgtttgaaaattattatagattaaaaactgatcaaaatttgtctgaatttgagaagaaaaatctcatgaagatcactacagaacttgatgcgagtgaaaacttgaaaaaaggagtagttgcaaatatgatcggagtgatttattatttgatgaaatattatgattataaggtaaaaattacccttgaaaatttaaatcaatcttttggaggacaggttgatggaataaataatcattatgtagatataaagaataatttcatgtaccaagaaaatcaagctttggctggagtcggaacatatcatttctttgaaatgcaattattaaaaaaaatatttaaaatttctactgaagaaggaattttacatttggttccaagttttggaagtgtgaaaaattactttaaagatattgaaaaatactcattgattgtcaatattggaagaaatgaaaaatataaccaatttggagttgttcactttgtaaaacctgataatacaagtaaaaaatgtcctgtttgtttaaatacgcaaacgactggaaaaaaagaaggaatgccgatcataaatagaaattacaaaaaatctaatatattttattgtgaaagatgcggattccaatcaatacacagtcattgtcaagaagaaaatattaaagatagtaatgattttcattattctgtagaagaagtagaaagaatagagatgaaaaataaagaagcaatagaaaaatataaaaaacaaggaaaaaatcttcattttataaaaaatggagatgataatgctgcatataatattggagagaaaataagagaacttccaaaaaaatcagatgtaaagaatacctcgatttcaggaaatatttctttttcatag

SEQ ID NO: 287 - DNA, 3654 bp, Unknown
  metagenome-derived sequence
  misc_feature (1)..(3654): Unk43 with TGA>GGA
atgtcccgcttgcggtttccacagcaatcaatgattccaatgacatcaatacaatggcgatgcaaatggtgcatacaatatagcccgcaaaggagccattatcctcaaaaaaatctccgaggaagagaaatcaaccatagtcagacaattcgagtgggacaacgaacgaagcaaataaagctacttttatcttttctcaatcaatccatcatgtctaccatcttctcagatttccagaacctctatgaagtaagaaaaacggtgaggtttgagttgaaaccaacgatcattaagagggtatttcataaatcaaatgatgtaaatctagaaattattttgaaagatatcatagaaaaacataaaaactttattgatatgttgggaaccacattcttttttgaggaggaagttagaataaatagtaaaggcgaagaagataagcaaccgggcctctccaacaaaccatttttgaacataatggaagaagataaggaagaggataaagcactctctcacgagagcgaagatataaagtcgcctctatcacagacaagaggaaaaggaataagagatttttctggctatagcccacaaaacattattcgtttcaagtatcagggaatagaaaaggcatttagaaatgagtggataaaatatagggaagatatagtaaagtatagaacgaatcaacaacgacaaaagataaaaattaagaactacataaccttttcagatttaggagatgatggttttttgaagcccttttttgaagaattattacaatcacacagagaactatacgatgaaatgagtgctttgatatgtacttacgaaaataatcattcaagattatcggatgtgtgcttcgcattaggacagctcaattctagaaagtatcttggagcattatacatgctctttgaaggagggtatgtggttcacaaaaacgatacagaaattattggaaaactcactgaacaattaaagacactaaaattaatcataaaggatgcgattagtttacttaggccacttcaatcttttggtctgcctatagaacatgttagcctcaattattatacaagaaacaaaacaccaaaagaatatgatgacgagattaaaatcaaagaaagagacttacaattatcctatagaggtgtattgggagcattgtatggaatagacagtaatcagtctattgagaatttgtataaagaaatgaaaaacttcaaggcacaacaaaaaatggcttttatgcaacaattgcaaagtcaggttagtctcgggaatttcagaaaaccattcacatttatagatcacgaaaaagagagtcatgaaaaatttgagcttcatctcttcagtaacttgtcagaagatatatataataagatgaagggattaacaaaagatattgaaggaatatcagacaaggagaaaaggaaagagttgaagcaaaaaagaggaaaattattaaaaaatcaattgggatgtaaacaatatgtcgatttttgcaataactacaaaaaagtagcaatggaatatggcaaaaaaaaagctgaagtgctcagtttgctaagagaaaaaatagaagctgagaaggagagaggacgaggatgtttatctaaaaacaatgaggaaagtttttttatcaatacatttgaacctaaattagccaaagatatgtacaatgatatatcaacaatgccacatcaaactgatggagaaattacaatatatctattgagttctatcactttgagagcattcaataaactctgtttcaaaaaaggatcaaaatttgtgaaaggactactaggaaaactcgatgttaaatatacaaagcaagctccatacaaagagaataacacattccccatcactctaaaagggaagaaagaaatggaagaagagggaatattaatacatttttacaatgaagtattgagaaaacaagatagtttatcaataaagtatagaagtgatgattcaaaagatcttttgaaaaactgcaaggatagtaatgagtttgaaatagtgctgaaacaagaaacatatatgctagaagagaaaaaaatatcaaatgatagatttcatgaactgatagaaaaatatcaaggaaactcatatcaaattacttcatgggatctgagaaaggagagggaaaatccagaagaacagactttgtggtggcggcagttttggagtcaaaagaacattgacaacaaatataatctcagaataaatcctgaaataactatttcgtttgtaggtaaagatgaagaatttgccaaaacacaccccaatcaaagcaacaatagaaaatcaaaggagaggtatttacttactacttccatgacccacaaatcagacaaggcatatattgatagtggatttatcgaagatacagcaagaaaagaaaatattatcaacttcaacacagtctacaatcaggataagcaatttgattatctctatggacttgataagggaacaaaagaactcgtaactttgggagttttcaaaaaaggaaatggaaatatagagacagtaaatctaggagaggaggtaagtatttataaaattacagaaaaaggatttcaaaaaaacaaaacagtaacaaacaaaaacggagaaacaaagattcgttacttaagggacaacccttccttgttcatggaatatatagatgataatcttatatttgaaaaacaaaacatcatttcatgtctaggagattttagttctgcgaaagtaatcaaaggacatattatcctcaacggagatcaagcgacactaaaaaatctctatctcactgatgtgaaaaggaaactatatgaaaaaaagagcacaggagaaatgacaagcgaaactattggatatgatcaaatagaaaatgttttctactatgaatatatcaatagagaaaatgttgagagatttccttttgaatcactcaaaacaatagattatctcatcacaaaagaagaaatagagaaagagttaaaagacttcttagaagatgtagcaaaagacaacatttcaatccagagaataaacaatctcagaaacgcaatctgtgcaaatattgtaggagtcattatgaaaatacaggagtcttaccctggctatattgtgcgagaaggattgggagacgatacgcaacataaacaaaagaaaacaaacacttatttaggaaatctcataaatgagaagatttacaataagttatttcttagtattgacgtccctccaatcttaaaaaaatttagatcagagacaaatattactacattagagcaagtgatacagcatgggaaggttatgtatgtcaataaagacaacacctcttcaaaatgtcctttgtgtaataaaaagctgtttggtcacatgacagattatgagtatgagatgcatcattatcaagaaggaaacgatgtagactacacacaaggaaatgacaataaaggaaagaatggaaaagaaagaatggataataacttgaagcagagcaaaaaaacagaaaataataattgtaactatcacatgaaaaataatccgtgcggattcgatttcatcaaatcaggagatgatcttgctgcctacaacatagccaaaaaaggactcgaatatctcaaatcaagagaaatatcataa

SEQ ID NO: 288 - DNA, 3096 bp, Unknown; identical to SEQ ID NO: 214
  metagenome-derived sequence
  misc_feature (1)..(3096): Unk46 with TGA>GGA

SEQ ID NO: 289 - DNA, 3432 bp, Unknown
  metagenome-derived sequence
  misc_feature (1)..(3432): Unk50 with TGA>GGA
atgacactacaaaatctaacaaatttgtatgaggttataaaaaccttaaaatttgaacttaaaccaagtattaatacaaaagaaagaataaaatttgataatataaaagacttgaaattattagagaatccttcagaacttttgcaaacaacaaaagaacttgcttctctacaaagatcgatctttggaattatttttaatttagggtctgaaaatataattatacacaaaaacttaataaaaattattgattctgatgtgttttattattttaaaaataaacaattatcatctatagtaagtttatcagaagttataaaatctataccagaattcagtaatacttttgacggatttatcaaaaatattgaagataatttatcaaaaaatatacacaaatttgaatcatatattttaaatatcgaaaaagtttataccaaaactgaaattggatttgctatgaagcaatatagtttgcaaatacaaaagtctcatgaagtcatttctttatttgtttataaaacaggaaaaattgatggagaactaaaagaaaatctgaaaaagtacttttcttttgaagatctagaaaatacaataaaaatttgtagtcaaacaatgaaatcttacaatccaactattggatttgaaatacacaaatttggatttaatagtaaatctataaataaaaaagcagatgtggattctttacaaaagcaatgtgaaaaattagaagaagaaatggaaaaacttgaagaacataaaatacaagcaacacagatatttgatgcttatacaaaacaatttaatgattatgttattcacggaaaagaacgagatgaaaaaacttggggaaaagtatcagaaaaacttatccctggagatcctaagttagaagcactaaaaaacaatcagacatcttctatacaagaaataaaagaagcaaaagaatatctaaaaagtattagagatggaaattttgactatcaaaaaataaatatagcaaaaaataaatttaaaaaaagtttagtttttgttgataaaataccaaacaagaaaaaagaaaatgaatactattgttttggagataatatatattgggatcttaaaataaagaaaactaaaaaaagtatattctatggaaagaataagggagatcttttcgcaaaacaaacagagttatttaatcagcaaaaacttactcattatgctcgtttacttagagataaaaataacttttttgttgctatggttgatagagattgtattctagaacttgagaatataaaagaagataaagatataaaagaagattttcttaaaataatggagtattcatccctcactagcaaggcagttgaaaagcttatctttgaaagaaatgttttgaactttgattttaaagatgaacagtttataatttgtaaaaaaatacgagaaacaagaagttataaagaaaaaggatcaacagaaacacaagcacaaactctagaagaaaaacaaaagttgattcagctagtcaaatttatgaatgatgcaataggacaaataaacgaaaaaatagaaaactctgtttttgattggaaaccttttgttattaaagatagttttgatgattttgaggaatttagaaaatatattacaaaaagttgctaccaaaccaaacgaacaaaagtttcaaaagataaaatatatgaattagacaaaaaaggaaaaataaacttatatcaaatttataataaagattttggagtagatccatattttgcaattacagaaagagataaaaatagcaattttatagaaaaaaagcaaaaaccaaatctttttacaatttattggaaagatttatttgaacagaatggagagaatataagactaaatccagaatcaaaactttatcttcgtccttcaaaaaaaatagaagacatagacggaaataattgtgattatggagcaagtaagttaagatttaaacataataaaattattgctgattttcaattagttttttatcctaccaaaaaggaaaaactagaagaaatacagaaaaaaatatacaatgagattaaagaaaaaactttttctgtaggaattgatttgggagaaaatagtttggctactatttgtcttatagatgacgaaaaaagagttgtgttagaccaaaatggaaatccaattatcaaagatttgactttggtaaataataagggagggtttgtagatatagataattgttttattgaaaatgaaaattataaaagaaaggacaaactatttatagaaaatgatggatcttattttttaacagattggtatttctcaagttttctatgccaaaaaccaataaaggaactatcaaaagaagaattaaaaaatgttttgattgaattagagaaaatgtctccaaaagagttaaagataactgatacaaatggaaataaagtttttgactatagatatgcttttgtctacaagcaaacagaaaataaaattcgctaccatctacaatcaattggcttaaatgaagaagaaaaaaagtttaaagaactagagctgatggatactactagaataaaatctggttatgtaagtaaattagtttcttatataacagatttggcaaaagagtacaatgcagtaattgtttttgaaaatttagaccaaaaagcaagttatataaaaggaataactttactttcggaggaattatttgaaaatgtatcatcaaaagaaaaaagtcaacttaccggaatttcagtatatcaaaatattcaaaataaaattatcagaaaatgtaatctttttatgcaaaaaacaggtataaacacaaaattacaaattacaccaaaatttaagaacatagaagagtttaaaaactttaatatgacaaataaagataaaaatgttggacgaggaaatgttatttttataaatgaggagaactcatcaaaagaatgtccaaattgtggatttattccagatactaatccaaaaataaaagattgcaaaatagtatataagtataatggagaagaaaaagaattgaatctagacgatgaaaaaataaaagatagaaaagaatataaaaaaataggagatttgatgcaaacaaggattaaatatacagatttgtcaaaaagcggaaaatggtatatagatggagatcctatggtttgtgtgaattgtggttatgatacaagaaaagaagcacgagtaaaaaaacacaatctcaaatcttgtgatgaaattgcggcatatatagtggccaaaagaggattagaatttataaaatctcaaaaagtagttgagtcaatatcacaaaaacaaataaacaatgagaaaatagaaatacataaaaatcaaaaaaataacggatttatcaatgaggaatctacaatatctgggaatatagttttttctggaaatatataa

SEQ ID NO: 290 - DNA, 3660 bp, Unknown
  metagenome-derived sequence
  misc_feature (1)..(3660): Unk57 with TGA>GGA
atgaaaaattttacaaatttgtatgaggtgcgaaaaacaattaattttgaattcaagccctcttttagcactcaaaaaagagtcttgaaagataggattaaagaaatttcaactttcaaggatgaagataaacatattattgatattatcgatttttttaataataaaaatcaagaagctgtgattcaaacaagagaatatttcaaaaatgagttagatttttttgatacagtttttgaatcttttgttcaaattatgaataaaatagagtcaaaaaaaaattatgagaattttagaatttatgtaaatactgcaaaaataaaactttttggaaaagattttcgagattgttatcaggaaatgagtagagcaagaacaagaaaagggagaggttgggattattattatagttttaatcaagggacacagaaaccagagtttaaaacagttcgatttggagattatattaccattcatcatttgtttgcatttcagtatgataaagaaacaaaaataggagaatttgaaaaactatttttaaataaaattaaacttattaagcaaaaatatgaatattcaaaaattgaaatattagattttttaaataccaaaaatcaaactgagaagtttattactaaaccagagattttagatcgactaaaaaatatggcttattgtttacaagatattctgaaaataataaatattttttgtgatgaaggaaaaaatggatcaaatggggatgcctcttttttaaaagatttagagggaattaggaaattattagaagaaaaaaatattgaagaagtaacaacggagattattaggcaagtaaatcaaattataaatcccaaagctcatcattataagtttacccttaattttaaagctaaaaatccaaatattcagctttctggaaatgatacttttttatcagaacaagaaattcaggaaaagttaaaaactgaaatggacaatttggagaaaaataaaaaagataaatcagattgccaaagttatatttcaaaatttgagaatattattgatgaaatattaattaatgaaatatttaaaaataaaacgaaatttatagataaaataaacaataataaaaaatttattgatgaggcgtgggataaggttaaaaacaaacaaggattccctgacaattttgaagaagtttttttaaaatataaaactaatattaaaacaaaaaaatctttggatacagatattgctagtaatcaaaatgaaagaaataattatgcagttataaatcagctaaaagcagctttaagaaacagtaaaaatactcattttggagtgattttagaaaaaaataagaattattttttagcactagaaagtaagattttaaataaaaaattaaaagcagataataaatatattcttaaaaatttagagaataaaaacaatttttgccagttgcttacttatgaatctttaacctggaaagccgttgaaaaactttgtcttttgccaacttctttgcttaatggaaaaaatgatgagataattaagtattggagcaaattttgcaaaggagaaattattacagagaataaaaaagatggagatacaagagatttgttaaatattccaaaaataagaaaatatttatctgaaattgtaaaacaaaataaattatcaaagttttttaataaaaatgaatttgaaaaatgtgtgactttagatgatatgaaatcatattttgatgataattgttttgtaaataattggattgaggctgattgggatgaaatttataagttagatgaaaatggcaagattgatttatatcagatttttaataaagactttgagcttgaagagtcttttgcaacttctaaaaatgataaagaaatagttaaaagaagaaaatcagcacaagagaaacttggtaatgattttgtttcaaaacaactaaatacaaaacgaagaagaacactttttacaacatattggagtaattgttttgatggctttgataccgaaaaatatcgtttacaaccagaaggaaaagtttgtataagaaatataagtcctataaataattctgtaagatatacagaggaaaaagtgcttggagattttgggatattatttaatccaataacaaaaatagttgatcaatcttcaaaaaagggaaaagagagaattgagaactttaatagttatttacaaaaatctattccaaaagatgaaatgtatattattggtttagatagaggtgaaaacagtttagtgagctatgctcttgtgaagtttaaaaagaaaagattagaaactgatgatataagtgtacgatttgacaatgaaattggagaaaaatcttgggtacttgatgagatacttgaagtcaaagagttatcggcagtaaaagtttttaatcaaaaaggtaaatggaaaaaaagtgaatttgtagaacaaaaagaagattttaactttgttcaaaaaacaggagagaactatgatgaagaattgaataaaaagaacgcagagttcaaaaaagaagaattgaaaaaacaatatcccaattataaaaacaggaaaggagaagataaagaaagagttattattattccgatgagacaaaaggaaaaggagaaagcgggagttagacaaataaaaacgggggcatattcagtaaaaatttgttcttggaaagaagatgatggaagtatttataattatagagttgcacaagagataattaaagaagaacgatttcgacaacggaaaaaacagaaagaggataaycttattgatactgaaaaatttaaaaatggttatgtatctaattttgttaattttatcgcagcaaaatcagcagaatatggtgcttttgtgtcatttgaaaatctgaatatttcagggggaaaagatggtaatttagagaaaacttttggggcaagtgtctatcaagttattgaaaataagctaatgagtaaattggggtatttagtgcaaaaaagcattccaaataatcacttacaatttgttcctaaaataaaaagaattgaggaattaaataaagatattgtttcagaaaataataagaacaaaaattaccaacttggttttgtgcaaataaccaatgaaactaatacttcgaaactatgtcccaattgtggatattcaaaaaatagatataagtcagcagaaattgaggatgaaatgattaatttggagctaaaagatctaaaattacaaaatgaagattttgggataaatacttttaaaaaaataaaatttcaaatagataacgatataaaagcttggagatatgcaggagtaactacagagggattagatttaaatcataaagatttttgtaaagtgatttctgatccaagacaaaatataaaaaaatcaaaagattttattcgttgtgtgtcttgtgggtttgattcacaatttcctgaaaaaaatcatagtaaatttgaaaaaataaatggtggagatgttttagctgcttacaacatcgccaaacgaggactagaatttatcacacaaaaaaaccaatcaggaccatcctcaatactgcatgcaataattttacacaaaaactggataagtattaagtttggattaaattcactactatttataaataagaaaatctgctataataggtag

SEQ ID NO: 291 - DNA, 3585 bp, Unknown
  metagenome-derived sequence
  misc_feature (1)..(3585): Unk58 with TGA>GGA
atgcaagaatttaaaaatatttatgaaattaggaagagtttgaggtttgagttattacctacaaataatgaagatatcttaaaacctaaaaatatagattatgatttaaatgaatttgtggaaaaattgaaagattttttatataaatttaaaaatactatcttttattattcagaagaacaagatatagaaaaaatgaattttaggaaaggattagaaataaaatatgtttggttaaaaaattatacaaaaaatgatttttataatggaacaaagaaaaaagataaaacatataaattaaatgaaattatttatttgaaaaaatattttttttacttttttgatgaattgtatgaaattattttaaatttggaagaaatagtacaattaccaaaagaaaatcaaggtagaaaatcaaatatagcttattatctaagaaagctaaataagaaagatgtaatagattttatatatgattttttgaaatatatacataatccacaaaatccaaaaacagataaatttttaaatgatttaaaagaacaaattgaaaatataaaaaatactttattagaacttaataagcaatttttacctttacaatcttctggacttgaagttgcaaaagctacttttaactattacacaatagataaatatagtaaaataaattttgataaacaaatagaaaatagattaaatgaattatataaatcaatatttaaattaaataatcacaggttatttaaggtttggataaataaagaaaaaagaaattttactataacaaacaaatttttagaaaaaattggattttttgattatttagaaaaagaaagaaattttttaaattttttattatctaagctagaaataaataaagaagaaattgaaaacaaaattaaaatattagataaagtattagtaaataaagattttaaagtattaaatttagatgaagcttatgaattaataaaagaatttaaagcaaatgctaaaagtcattttacttctgatttaggagcttttgaatttagaaaatttaaaataccttatagtaaaataacaaaagaaaataaaaaggataatatagaaggaactttggaaataaactatgaaaattttttaaatattcatcctttgtttgaaataagtgatgatgattttaaaaaattaaaagaattaactgaagaaataaataattattcattaaagaaaaataatattttacaaaaattaaaattaaaaaaatctaaattggaagcacaaataaaatctaaacaaaaagaaaatggagaattgaataaagaagaaaaagattttttagaatatgataacaaaattggagaattaacacaaaaaaggggaaaatactttaataaacctggagaaaaagtatattcttggaattatttttatataaatgaattttttaagaatattgcattagaaagaggaagaataaaagctgaaattaaaggattggaggaagaaaaaaatcaggcaagattacttaaatattggtctttaattacagaaaaagatgaaagtaaatatttaatattaattccaaaaggaaatagaggaaatgtaaaagaaaagttagaagaatttggagaagaaaaaaatgatgttactatttattattttaaatctttgacattaagagcattacaaaaactatgttttaaatctagagaagtaaatacttttatgtgggggaaaaatggagttgcatatgaattattgcaaattaacttagataaaggatatattaatattaataaaaaaggaaaaaaacttttaaaaagatatgatgaattaaaaaatgaagaacaagaagtgatacaattttatcaagatgtattaaaatcaaaaaatgcaaataagcaattggatttagttgattttggaggattagatgaagttttaaataaaaattattcaagtatagaagattttagaattgatttagaaaaagtttgttatgtaaaaattccaaaacagatatcaaaagaagattatgataaattattagagaaaaataatattttagaatttgaaattacttcacaagatttaagaatacaaaaggaaaattatgagaatttaaaaaatcataaaaataaggagcatactaaaaaatggctaaatttttggtcagaagaaaataacaataaaaattatcctataagattaaatccagaaataaaaattttgtatagagaagctttgcaagagaaaaaaggagattataaaaatagatacacaaaagaacaatttacacttactaccactttaggatttaatattccaagtaaaaaatttgattttagttttaatgatactagagatataaaagaaaaaatagataattttaacaataaatttaataaagaatttaatggaccatggtattatgggatagatagaggaataaatgaacttgcaactttaacagtagtgaaatggacagatgaaacttataatacaaatggaatacaaattaataaaccagaatttgcagaaatagaagtttataaattaaaagatgaaaataaaaaattaaaaattataaattataaaggagaagaaaaagaagtaaatattatagataatatttcatattttttagatcaagaaaatttgtttgaaaaaataataacttcaactattgacttaacacaagcaaaattaataaatggaaaaattgttttaaatggtgataaaaatacttatttaaaacttaaaaaattatctgctcaaagaagattatttgaattattttcaaaaaatttaattgcaaaaaatagtcaatttgaagctggaaaaaaaatattatttgtaaaaagaaatgataataattatgaaccaatttattggtttacagaggagcaaaaaaagaataaagaattacaaaaagatataatagaagaattaaaaaaatatttagaagatttggaaaataaaaatatatttgaggatactgaaacaatagaaaaaataaatcatctaagggatgcaattactgcaaatattgttggaattatttattttttacaaaaaaaatatcctggaaaaatatatttagaaaatttagaaacaaaagctcctcaacaagaaacttttagttttaaaaaaggaaaatctggagattatacagaaatagaagaaaaaatgatagatggacattttaggcagtcaaatacagatatcagtagaagattagaatggggattatatagaaaatttcaagaaagtggatttgtgccttcaaatttaaaacaaacaattttattgaaagatgaatttaaacaataccaatttggaattataaattttataaaagtaaaggcaactagttcaacttgtccttattgtgaaattgttacagaaaataaaggaggattaaaaaaacatataaaagaagataataactgtaaattaaaatcaaattttcaggaagataaagataaaataaaaaattgtatttataaagatctatataataattatcaaattaattatgatagtatagctagttatactattgctaaatttggaaagaaaaatttatttaattaa

SEQ ID NO: 292 - DNA, 3807 bp, Unknown
  metagenome-derived sequence
  misc_feature (1)..(3807): Unk59 with TGA>GGA
atgattaatctagaaagttttaaaaacttgtatgaagtgaggaaaacagtcagatttggattaaatcaacctagaaagaaaagtgatattaataaaacgcatggactattaaaagatttggttgagatttcttttgagagagaaaaaaaactaattaataatgaaaataatcacgtactaattgatacagagaaagttcttatagagaaattacagcaatatgtaaatggactagaagtacaactaaaaaactggaaaggagtatatcaaagatatgatttaatagctataaataaagactactataaaatattggcaagaaaagcaaagtttgatgctatgtgggagattactaaatttgataaaaaatcaaataaatatataaaagttaaacaaccccaagcaagtcaaatttctttatcatcattaaagattggaaatagaagtgatagtattattcaatattggggagagataagtcagaaaacagattatttacttaatatttttaaacctaaattagaacaatacgagagggctattaatgatgctaatagtgctcatattaaacctgatagtattgactttagaaaaacctttttacaacttttgaaactaactaaggaatttttacaacctttattggatagatcaattattttcgagctttcaaagaagaaagtttctcaagaaattgaaaagatttctgagtttgctggagaaaaaaataatacaaaaatttataatgtattgaaaaatggagaagaacttagacaatactttgaagcaaatggatcccaagttccatatggaagagtaagtctaaactattatacagcagtacaaaaaccaaataattttgatcaagaaattaaaaaagctatagacgatttaggaataataaattttttgaagaaaagtgatagtcaaatgatcgattatcttcatcaaggatcaaaacagaaaataaaattgttacttacttcaaaacatccttatcctattgagttattacagttatttaaagtaaaacctattcctttttcagtaaagtataatttggcaaagttcattgagaaaaattataagaatgaaatcagtttatcttatgaagagattttagataaattgaatttgttaggaagagctattgatatcgcaaatgattttaaaaattccaataatcaaaataacttttctcttgatgaataccctgtcaagttagcctttgattatgcttgggaaaatacagcaagaagtttaaaaagaactatacctttcccaaaagaggtatgtaaacaatttttaaaagataattttgatgttgatgtcgataatgcagattttaaattatatgccaatcttttattcatagcggataatctagcaattattgaatacaataatccaaataatgaagtagaacttataaataagataaaacaagcatttgactctatagacttttcttttgataaagaaagatatggaggatataaaaatgatgttttagtattgctaaataaggcaaaatctcaaagagactattccactatattaaaagcaaaacaagaattgggattattgagaggaggactgaaaaataagattaaaaaatacagagatttaacacagagattaatagacaaaaagaattcacattttggaatcgcgagttttgtaggaaaaacacttgctaaaataagagatcgactcaaggaagaaaatgaactcaataaaatttctcattacggagtaattcttgaagataaaaatcaagataaataccttcttatattacaacttgatggaaaagatacaagagaaaaaatatctcaaaaacttggcaatggagacataaaggtgtatcaagtaaattcttttacttcaaaagcattaaataaatttatcaaaaattctggatcggaagatgcaaaaaaatttcacggagattttagatataaacataaagaagtttcaatatatgatgaaaaaggaaaatggacaggatatcaggaaagttttttaagtcatataaaaaagtgtttaattgactctgagatttcaagagaacaaaattgggaagcctttggttggaattttgctggttgtaatacttatgaagagatagaaaaagaaattgattctaaaggatatcagttgactgaaaactctattttaaaagagactttaggaaaattgctgaaagatgaaggttgttcgttatttcctattattaatcaagatatttcaagtcaaaaacaagaaaataaaaatatttttactttagattttgaaaaggtatttgagggaaaagaatataggattcatccagaattttctatcttttatagaaagcccatggaagaacacgagaaggagaataaatcgggaatcataaatcgttttggaaggttacaattattggcaaatcttggtatagaatttattccaagaaattcttcttttaaaacaaaaaaagaacaaaatagaattgcgattgatcaaaagaaacaaaatcagttagtccaagagtttaaccaggaaaaagtaaatacatattttgaaggattagataattattatatttttgggatagatagaggaatcaaacaattggcaacattatgtgttactgataaagatggagttatacagtcctttgatatttacacaaaattttttgattctaaagaaaaaatttggaaatatacaaaaactagaacggaaggtgttcttgatttgacaaatcttaagatcgaatctgataaaaatggaaatacttatatagttgatatttcgttatttgatgcaaaggatgaagatggaaatcctacaggtacaaataaacaaaatattcaacttaagcaactggcatatatcagaaaattacaatatcaaatgtctgcaaatgaagaaggagttttaacttttttgggaaaatataagaacaaagaggaaagagaacaaaatatgaaaggactaattactccatataaagaaggaaaaaattttgcagatttaccaatggatatttttcaagaaatgtttgaaaattattatagattaaaaactgatcaaaatttgtctgaatctgagaagaaaaatcttatgaagatcactacagagcttgatgcaagtgaaagcttgaaaaaaggagtagtcgcaaatatgataggagtgatttattatttgatgaaaaaatatgaatataaagtgaagatttctcttgaagatctttcaaatgcttggtttttttcaaaagacggactttctggagatgttgtgctaaatacgaaaaatgatgaaacaatggatttaaagaaacaagataatctagcgcttgctggagttggaacatatcatttctttgagatgcaattattgaagaagttatttaaaatttctaccgaagaaggagttttgcatttagtcccaagttttggaagtgtaaaaaattatatagagattatgaagataaaaggaaaatatgtatacaaacaatttggcattgtttatttcgttgatccaagaaatacaagtagaaaatgtcctgtttgtggaaagggaggaaaaaaatatatctcaagagttgacaatattgtaacatgtaagaattgtggatttgatacatcatcagacaattccatccttataaataattatgaaaaacaaggaaaaaaacttcattttataaaaaatggagatgataatggtgcatataatattggagagaagataagagaacttccaaaaaaatcagatgtaaagaatacctcgatttcaggaaatatttctttttcatag

SEQ ID NO: 293 - DNA, 3447 bp, Unknown
  metagenome-derived sequence
  misc_feature (1)..(3447): Unk61 with TGA>GGA
atgactatggtaaatctagaaagttttaaaaatttgtatgaagtgaggaaaagtgctaggtttaaaattgttcctaaaaaaattttcagacagaaggaagatagaggtagtatttataatacagaagacatagtaaaacagtataaaggtattataaaagatttagaaagcatattgtactatgaaaattttgttcctgaagccgaacctttgagtaataaattaggagatttatgtgatttttctaaatttgaatctgagttagaagaaaaccaagaaatatcttctttgaaaaataaagaaagttctgatttgattcgtataaaacatgcttggttacaaaaatattttacaaacgattggcacgaaaataaagactttataatttctaaaaggctggatcgcaagagaaatatagaaataaaaacgaagaattggacaactattggaagtgtaaattttctaaaagaattttttgaaaatttttttacagatgctaataaatattttaatgtcatatcaaaactacttcaagtgcaagattttgaaaaaaatagacaatcagatataaaatttgcattacaaacaattcaaggaaaagatcatttatataaaatatatcaactttttgaaggaggatatattgaacataaaaatgataatacatcaatcaatgagttacaagaaaaattaaaagtattcaaaaataatgtaaataattatatagaaaattgcagaataaacgactcttttggacttcccttggaatatgttagcttaaattattatacaagaagaaagactcaaaaagattatgatgaagaaattcttaaaaaatcagagtccttaaaaaagaaatttgatggagatttaggagaattatatggaattagtaaagaatcagaaatttcagatttatacaacaatatgaaactgttcaaagcaaatcaaaagagtgcttttttacagttattgcagagtcagacacctttttcaaaactaaaaaataattttgagtatattgataataaaggagaaaggtactccgattacaaaatacaattgtttaatgatataacagaagaaaattataaagaaatgaaggatctaacttcaaaaattgaagaatcagacaataaacaaacaagaaaagcattgaaagagaaaagaggaaagtattttttattccattgtaaaaaatataacaatttctgtgattattataaaaaagtagctatggaattcggaaaaagaaaagcagaaatattgtctttagaaagagaaaaaattcttgccgaaagagaaagaggatatggatttttatcaagggacgctagtaataattattatataaatacttttgatatagaaaatacaaaaaatgcttatgattttttctcaaatcagtctcaaaagcaaggagagattacctattatattttaagttcaattactttaagagctttggaaaaattatgtttttcaaaatcttctaatttttataagggaaatattgttcaaaaaatagatgaaaaattcttaaaaattcaagaagcaacaggaaataaaatttttaaaagtaaaagagaacttgaggaaggagaaaatttaattgaatttttggcagaggttctcagacttcaaaatacattaggaataaaatttaaatcagaaaaatcattagataagctcaagggctgtgaaaacatatcagattttgaaattttgttaaagaaagaaacatatattttggatgagtacaaaatatccaaagaagattttgaaaaagcacttgagaagtttaaaggaaattcttttcttattattgataaagactccgataatcataataaaaatagcgtattctctcagtggtggactagattttggaaaaaaaataatacagagaattatatattaagaatcaatccagagttggttatttcatttagaaaaggagacgaagaaaggtttaaaaataaaatatcatttcatagaaagaaaaatgatagttatatgctaacttttaatttttctcatttttctgataaatcttatattaattcagaatttatagatgacattcaaagaaaggagaatttagagagatttaataatttatacaataataatgtagatttagactacttttatggaattgataaaggaacaaatgagttagtaactttaggaatttataaaaaaaatggaggattgatggattcagtcaaaataagtgaaaaaataccagtctataaaattacaaataaaggattagctcattttgaatatatagtaaatgaaaaaacgggaaaattagttattgataaagatactggagaggagaaaaaaagatatctatcaaaaaatgtttcatattttataaaagatttagaaaataaagaactatttgaacagttagaaataagttcttgtttaggagatttaacatatgcaaaaattattaaaggaaatattattctaaatgctgatatttttaccactgtcaatttatacaaggtaacagctaaaagatttcttaatgatgcgacttttagagggaagataaaaaataatactgtattatttgatgatgaaaataaaagtttttattttgaatacgagaatagaggaaagctacaaaaacagaatatattttattggaaggatgattttgattatttgccatgtgatgatatatttcagaatctaaaagaagaagtagaaaatgaacttaatatgtatttaaccagtatttcaaatgaagaagatatctctatgcaaagagttaataattataaaaatgccatctctgcaaatattgttggaataattactgagttacaaaaacattttaatggatatatttgttatgaaacactggatgcaggacaaatagaacaaaaaggattgaatacttttataggaaatactcttaacgaaaagatttataataaattacaattaagtttagaagtcccgccaattttaaagaaatttagaactgatattggaacgaaagaaataattcaacatggaaaaattatttatgttaacgaaaaaaatacttcttcagcttgtccaatttgtaacgagcaattattaaatggaaatctatctgataagaaggatgatgaagtttttaaattaggaggacatttaagtgattttgaaaataatatgaaacatttaacagatctagactatcaggaatggttaaaaaataaaagttttaaaaaagctaacactaataaaaaaggagaaatagaaaaaaataaatacaattctggaactataaatggaaaatcttgtgattattatattggaaatgaaaattatccagaatttgaatttataaaatcaggagacgatcttgctacctacaacatcgccaaaaaagctaaggaatatttagaatctttgtcaaaaaaagaagactcagaataa

SEQ ID NO: 294 - DNA, 3372 bp, Unknown
  metagenome-derived sequence
  misc_feature (1)..(3372): Unk62 with TGA>GGA
atgttagaaaatttaactaacctttatgaagtgatcaagacattaaaatttgagctcaagccaagcaagtttactttaaaaagatgtgattttgatagggcttttgaagctgatcctcatgctttatttgaaaaattaaggtcagtacataggtttcaagaacaaatcctcgatttattaggaaaaacatcttctaaaaaaattgtaattcataaaaatttaataaaactgattgatgctgattatttttatcaactaaaatcaaaagctattagctcaaataatactatagctgttcttagtcaggatttccaagaagagtttttcaattatatcaaagaaaaatttaatagattacattcaactaattacagtcttgattatttactttgggcagattatttagaaaatcctacaactatagataaaaaacctacgaaatcagaaatagcttttgctacaaaaaggtatgttcatgcaattgaaaaagtggaagaaattctatctaatttaatttataaaacaggaaatattgatagagaaattgaaagtttgctagctaattattataataatcaagatttgaaaccacttttaaaagtagcaaagagctatctacaatcatatagtccaacaagcggatttcaggtttcaaaatttggatttaatgcaaaagcaatccaaaagaaagttgatgtagaaaaaatggagcaagagattggatctttagaaaagaaaatgcttgatttggaggagaaaaagattatagccacgcaaatttttgatgattatgccaaaaaatttgtacaagagaagataaaatctgatcctaaattgttggctcttagagagaatcaaacagctagtcttgatgaaataaaaagagcaaaagaatatctaaaatatttgaaagagggagattttgattaccaaaaaattttaaaagaaagaagtaaggcaagaaaggaaaaaagggattctatgattaaatttactggagatagagagtattgtgaactaaaattggcaaaaactgatgctagtgtggtatacggtagagcaaaacaagctttttttgccaaacaacaagaactatattctcaacaggctttgacccattatgcgagaatcttgagaagtgaaggaaattattttgtggcaatgatagatagagatgatgtatcttttttagagcgtttaggaactaatgataaagtaaataatgaaaaatttgaaattttaagatatgcttcattgacagcaagagctgtagaaaagttaatttttgaaaagaatgctttaaaatttaatatatatgacaaagagtataaagaatgtaaaatgatccgagaaaaaagatcctataaagagaaaggaaatgaagattctcgctcaaagaatgaaaaacaaaaggaaaatttaaaaaaattagtcttatttttaaatagtgctattgaacaactaaataaaaaacttgaaggaggaatctttgattggaaaccattcctaattggaaacgattttgataatttctctgaatttcaaaaatatattacagaaaactgctatattgcgagacgagaagctattgataagcaaacaatttacgatttggatcaaaaaggaaaactaaatttttaccagatctttaataaagatttttcagttgatccttattgtgcaaccactgaaagagacagaagtagtacaataaaaaacataaatttacaatctaaaaaaaatctttttactttatattggcaatctttatatacagaaaacagtggaacgattagattaaatccagagtcaaatctttattttcgtccatctagagtccgtacggaaattgatttatgtaatgattgcgaagcaagtaaattgagatatagacaaaacaagattatcggagattttcaattggtattttatccgactaaagaacttccttttgatcaattacagcaaaagattttaaaaaattcagaaaaatcctatgcgatagggatagatcttggagaaaatagtttggctacgatctgtcttgttgacaatgaaaagaaggttgttttagatggaaataataaaccgatcatcaaagacttatctatgatcaacaataaaggagattttgtagaagtggaagactgttttattgatggaaaaccgtatgaaaggaagcaaaaattattgattggagggacagaaaccaagccttatatgttaggacgacattttcctaaacatttgcaaaataaggtaattgcagaaatgtcgcaagatatgctttttgaagtattgcaaatattggaaagtttggctccagaaaagcttggaattgttgataagcaaggaaataaagtatttgattataattacgcatttgaacatttaaaggctataaacaagattagatatcatctacaagtatttaaccatactaatgatgaaatgagaattctagaaaaagatttattagcaagtattaaaatcaggggaggatttgttggaaagattgtttcatatattactcaaatggcaaaaaaatataatgctattatcgtattcgagaatttagatcaagaaattggtagaatcaaaggaagatatcttttttcagaacagtcttatgctaaagtttctcctaaagaagagagaatgtataaaggaatctctccttatcaattgatgcaggataaaattatccaaaaatgcaattatctcttaacaaagcaagaaatcaaaggtggaatgcaaatttctcctagactaaaaagacaagaagatattaagcaattaactttactaaaagataagaattgtgcttggggaaaaatcatttttgtcaatgaggaagattcttctaaagaatgccctaattgtggctttgtccctggaaaatattcaagtaatatcaatattaaagacgatggaattgagcttatggcaaacaaaaaggataaaaaagttttctcttttgcagaaaatcagcttttgtctgaaagacgagaggcttatcaaaagatttcagatattgataaaaagaaagctcttttaattgaaactagagtaggaaagacatttttaaaatcttatatggatattcaaggagatccaatgatttgtgtgaactgcggatatgatacgagaaaaactaagcgagtagaaaaatataacttaaaaagttgtgatgaaatagcggcatacatcatagcaaaaagaggattggaatttatggaaaataaaggatatgagactcaagaagtatctatttcagttggaggagattcttacaacaagccatctgatggagaacaagatgattcttgtgcttcaggagttaaactttcaggaaatatttctttttcataa

SEQ ID NO: 295 - DNA, 2721 bp, Unknown; identical to SEQ ID NO: 282
  metagenome-derived sequence
  misc_feature (1)..(2721): Unk63 with TGA>GGA

SEQ ID NO: 296 - DNA, 2733 bp, Unknown
  metagenome-derived sequence
  misc_feature (1)..(2733): Unk64 with TGA>GGA
atggagaaaaattataagagtgaaatcaatttatcttatgaagacattctaaataaatttaatttattaggaagagctattgatatcgcaaatgattttaaaaattccaataatcaaaataacttttctcttgatgaatatcctataaagttagcctttgattatgcttgggaaaatacagcaagaagcttgaaaagaactatacctttccccaaagaggtatgtaaacaatttttaaaagataattttgatgttgatatcgataatgcagattttaaattatatgccaatcttttattcatagcggataacctagcaactatagaatataataacccaaataatgaagtagaacttataaatgaaataaaacaagcatttgaatgcattagctttccttttgataaagaagtatataaaggacataaagaagctattttggaattattagataaagaaaaatctcaaagagactattccactatattaaaagcaaaacaagaattgggattattgagaggaggattgaaaaataagattaaaaaatacagagatttaacacagagattaatagacaaaaagaattcacattttggaatcgcgagttttgtgggaaaaacacttgctacaataagagatggtttaaaggaagaaaatgaactaaataaaattagtgattacggagtaattattgaggatagtaatcaagataaatatctacttactctagagctaaatgggaaagatataagagatagaattagaaatagcctaggaaacggagaatataagacatatgaagtaaattcctttacttcaaaagcattaaataaatttatcaaaaatcctttatcagaagacgcaaaaaaatttcatgggaaatataaggatgaatatagttttggatatgaaaataaagatggagatttcacttataaaataacaaaagtttcaaaatatgatgaacaaggaaaatggacaggataccaggaaagttttttaagtcatataaaaaagtgtttaattgactctgagatttcaagagaacaaaattgggaagcctttggttggaattttgctggttgtaatacttatgaagagatagaaaaagaagttgattctaaaggatatcagttgactgaaaaccttatttcaatggggaatttaaaaagcttggtaaaagatgaaggttgcttgttatttcctattattaatcaagatatttcaagtcaaaaacaagaaaataaaaacatttttactttagaccttgaaaaggtatttgagggaaaagaatgtaggattcatccagaattttctatcttttatagaaggccaatagaagaacacaagaaggagaataaatcaggaatcataaatcgttttggaaggttacaattattggcaaatcttggtatagaatttgttccaagaaatccttcttttaaaacaaagaaagaacaaaatagaattgcgattgatcaaaagaagcaaaatcagttagtgcaagagtttaaccaaaaaaaagtaaatacatattttgaaggattagataattattatatttttgggatagatagaggaatcaaacaactagcaactttgtgtgttactgataaagatggagttatacaagattttgatatttatacaaagcactttaatagtgaaagtaaaaaatgggaatacaaatttcatagaaaagatggaatattagatttaactaaccttaagattgagtctgatagaagtggaaataaatacatagtagatatatctttatttcaagctaaagatgaagatggaaatcctacaggtacaaataaacaaaatatccaacttaagcaacttgcatatatcagaaaattacaatatcaaatgtctgcaaatgaagaaggagttttaaattttttgggaaaatataagaacaaagaagaaagagaacaaaatatggaagaactaattactccatataaagaaggaaaaaattttgcagatttaccaatggatatttttcaagaaatgtttgaaaattattatagattaaaaactgatcaaaatttgtctgaatctgagaagaaaaatcttatgaagatcactacagagcttgatgcaagtgaaagcttgaaaaaaggagtagtcgcaaatatgataggagtgatttattatttgatgaaaaaatatgaatataaagtgaagatttctcttgaaaatctttcaaatgcttggcttttttcaaaagacggactttctggagatgttgtgctaaatacgaaaaatgatgaaacaatggatttaaagaaacaagataatctagcgcttgctggagttggaacatatcatttctttgagatgcaattattgaataagttatttaaaatttctaccgaagaaggagttttgcatttagtcccaagttttggaagtgtaaaaaattatatagagattatgaagataaaaggaaaatatgtatacaaacaatttggcattgtttatttcgttgatccaagaaatacaagtaaaaaatgtcctgtttgtggaaagggaggaaaaaaatatatctcaagagttgacaatgttgtaacatgtaagaattgtggatttgatacatcatcagacaattccatccttataaataattataaaaaacaatgtaggttttttcttcacaaaaaaactagactttttagtctagtttttcaaatatatcatgataatgttccaaagtgtaactag

SEQ ID NO: 297 - DNA, 3816 bp, Unknown
  metagenome-derived sequence
  misc_feature (1)..(3816): Unk66 with TGA>GGA
atgttagaaagttttaaagatttatatgaggtgaggaagacagaaagaatcggacttactcagccaaataaaaaaggagaaaaaatatctcacttagagcttaatgaactagtaaaaacatcacttgaaagaataaaaagtgatatagacaaagatgataattctataataaaaaatgaaaaaaatttaattgagaattcaagacaatttgtaaatgaattaaatgttcagtttggaacttggaaaaatatctataaaagatatgacttaatttcagtaaacaaagattattatagaatactagctaggaaagcaaaatttgatgctttttggaaagaaggacgcacaaaatacccaaaagctaatcaaattactttatcatcattacaaaaaggaggaagaaaggaaaagataatagaatattggaaagaaataattgaaagaagttattatttaataagtatttttacacaaaagctagatcaatatgaaaatgcagtctcaaatccagaaaaattatcccacacaaaacctgattttacagattttagaaaaatatttctacaacttctaaaagtaagtgaagactatttaaagcccttatttgataaatcaattaattttaaaactggaaaaaaattagaatcagaagaagatataaaagaaataaatttatttatatctgaggaaaataacaaaaacatctattcattactaaaattaggaagtgatataagagaatattttgaagaaaatggagcacaagtaccatataaaaaggtaagtttaaattactatacagcagtacaaaagccaaataactttgaaggagaaattaaaaaagctatagaggatttatggatagttgagttcttgaataaaagtgatagtcaaattatcaattatcttcatcaaggatcaaaacagaaaaaaaaattattacttacttcaaaacatccttatcctattgagttattacagttatttaaagtaaaacccattcctttttcagtaaagtataatttggcaaaatttatggagaaaaattataagaatgaaatcaatttatcttatgaagacattctaaataaatttaatttattaggaagagctattgatatcgcaaatgattttaaaaattccaataatcaaaataacttttctcttgatgaataccctgtcaagttagcctttgattatgcttgggaaaatacagcaagaagtttaaaaagaactatacctttcccaaaagaggtatgtaaacaatttttaaaagataattttgatgttgatatcgataatgcagattttaaattatatgccaatcttttattcatagcggataacctagcaactatagaatataataacccaaataatgaagtagaacttataaatgaaataaaacaagcatttgaatgcattagctttccttttgataaagaagtatataaaggacataaagaagctattttggaattattagataaagaaaaatctcaaagagactattccactatattaaaagcaaaacaagaattgggattattgagaggaggactgaaaaataagattaaaaaatacagagatttaacacagagattaatagacaaaaagaattcacattttggaatcgcgagttttgtgggaaaaacacttgctacaataagagatggtttaaaggaagaaaatgaactaaataaaattagtgattacggagtaattattgaggatagtaatcaagataaatatctacttactctagaactaaatgggaaagatataagagatagaattagaaatagcctaggaaacggagaatataagacatatgaagtaaattcctttacttcaaaagcattaaataaatttatcaaaaatcctttatcagaagacgcaaaaaaatttcatgggaaatataaggatgaatatagttttggatatgaaaataaagatggagatttcacttataaaataacaaaagtttcaaaatatgatgaacaaggaaaatggacaggataccaggaaagttttttaagtcatataaaaaagtgtttaattgactctgagatttcaagagaacaaaattgggaagcctttggttggaattttgctggttgtaatacttatgaagagatagaaaaagaaattgattctaaaggatatcagttgactgaaaactctattttaaaagagactttaggaaaattgctgaaagatgaaggttgttcgttatttcctattattaatcaagatatttcaagtcaaaaacaagaaaataaaaacatttttactttagaccttgaaaaggtatttgagggaaaagaatgtaggattcatccagaattttctatcttttatagaaggccaatagaagaacacaagaaggagaataaatcaggaatcataaatcgttttggaaggttacaattattggcaaatcttggtatagaatttattccaagaaattcttcttttaaaacaaaaaaagaacaaaatagaattgcgattgatcaaaagaaacaaaatcagttagtccaagagtttaaccaggaaaaagtaaatacatattttgaaggattagataattattatatttttgggatagatagaggaatcaaacaattggcaacattatgtgttactgataaagatggagttatacagtcctttgatatttacacaaaattttttgattctaaagaaaaaatttggaaatatacaaaaactagaacggaaggtgttcttgatttgacaaatcttaagatcgaatctgataaaaatggaaatacttatatagttgatatttcgttatttgatgcaaaggatgaagatggaaatcctacaggtacaaataaacaaaatattcaacttaagcaactggcatatatcagaaaattacaatatcaaatgtctgcaaatgaagaaggagttttaacttttttgggaaaatataagaacaaagaggaaagagaacaaaatatgaaaggactaattactccatataaagaaggaaaaaattttgcagatttaccaatggatatttttcaagaaatgtttgaaaattattatagattaaaaactgatcaaaatttgtctgaatctgagaagaaaaatcttatgaagatcactacagagcttgatgcaagtgaaagcttgaaaaaaggagtagtcgcaaatatgataggagtgatttattatttgatgaaaaaatatgaatataaagtgaagatttctcttgaagatctttcaaatgcttggtttttttcaaaagacggactttctggagatgttgtgctaaatacgaaaaatgatgaaacaatggatttaaagaaacaagataatctagcgcttgctggagttggaacatatcatttctttgagatgcaattattgaagaagttatttaaaatttctaccgaagaaggagttttgcatttagtcccaagttttggaagtgtaaaaaattatatagagattatgaagataaaaggaaaatatgtatacaaacaatttggcattgtttatttcgttgatccaagaaatacaagtagaaaatgtcctgtttgtggaaagggaggaaaaaaatatatctcaagagttgacaatgttgtaacatgtaagaattgtggatttgatacatcatcagacaattccatccttataaataattatgaaaaacaaggaaaaaaacttcattttataaaaaatggagatgataatggtgcatataatattggagagaagataagagaacttccaaaaaaatcagatgtaaagaatacctcgatttcaggaaatatttctttttcatag

SEQ ID NO: 298 - DNA, 3630 bp, Unknown; identical to SEQ ID NO: 285
  metagenome-derived sequence
  misc_feature (1)..(3630): Unk67 with TGA>GGA

SEQ ID NO: 299 - DNA, 3807 bp, Unknown
  metagenome-derived sequence
  misc_feature (1)..(3807): Unk68 with TGA>GGA
atgattaatctagaaagttttaaaaacttgtatgaagtgaggaaaacagtcagatttggattaaatcaacctagaaagaaaagtgatattaataaaacgcatggactattaaaagatttggttgagatttcttttgagagcgaaaaaaaactaattaataatgaaaataatcacgtactaattgatacagagaaagttcttatagagaaattacagcaatatgtaaatggactagaaatacaactaaaaaactggaaaggaacatatcaaagatatgatttaatagctataaataaagactactataaaatattggcaagaaaagcaaaatttgatgctatgtgggagattactaaatttgataaaaaatcaaataaatatataaaagttaaacaaccccaagcaagtcaaatttctttatcatcattaaagattggaaatagaagtgatagtattattcaatattggggagagataattgagaaaacagattatttacttaatatttttaaacctaaattagaacaatacgagagggctattaatgatgctaatagtgctcatattaaacctgatagtattgactttagaaaaacctttttacaacttttgaaactaactaaggaatttttacaacctttattggatagatcaattattttcgagctttcaaagaagaaagtttctcaagaaattgaaaagatttctgagtttgctggagaaaaaaataatacaaaaatttataatgtattgaaaaatggagaagaacttagacaatattttgaagcaaatggatctcaagttccatacggaagagtaagcttaaattaccatacagcagtacaaaaaccaaataattttgaacaagaaattaaaaaagctatagaggatttaggaatagttgagttcttgaataaaagtgaacaggaaattacaagctatttacatcaagattcaaaacaaaaaatacaattattacttacttcaaaacatccttatcctattgagttattacagttatttaaagtaaaacctattcctttttcagtaaagtataatttggcaaagttcattgagaaaaattataagaatgaaatcagtttatcttacgaagagattttagataaattgaatttgttaggaagagctattgatatcgcaaatgattttaaaaattccaataatcaaaataacttttctcttgatgaataccctgtcaagttagcctttgattatgcttgggaaaatacagcaagaagtttaaaaagaactatacctttccccaaagaggtatgtaaacaatttttaaaagataattttgatgttgatgtcgataatgcagattttaaattatatgccaatcttttattcatagcggataatctagcaactattgaatacaataatccaaataatgaagcagaacttataaatgagataaaacaagcatttgactctatagacttttcttttgataaagaaagatatggaggatataaaaatgatgttttagtattgctaaataaggcaaaatctcaaagagactattccactatattaaaagcaaaacaagaattgggattattgagaggaggactgaaaaataagattaaaaaatacagagatttaacacagagattaatagacaaaaaggattcacattttggaatcgcgagttttgtaggaaaaacacttgctaaaataagagatcgactcaaggaagaaaatgaactcaataaaatttctcattacggagtaattcttgaagataaaaatcaagataaataccttcttatatcacaacttgatggaaaagatacaagagaaaaaatatctcaaaaacttggcaatggagatataaaggtgtatcaagtaaattcttttacttcaaaagcattaaataaatttatcaaaaattctggatcggaagatgcaaaaaaatttcacggagattttagatataaacataaagaagtttcaatatatgacgaacaaggaaaatggataggatatcaggaagaatttttaaatcatataaaaaagtgtttaattgattctgatatttcaagagaacaaaattggaaagcctttggttggaatttttcttgttgtaatacttatgaagagatagaaaaagaaattgattctaaaggatatcagttgactgaaaactctattttaaaagagactttaggaaaattggtgaaagatgaaggttgcttgttagttcctattattaaccaagatatttcaagtcaaaaacaagaaaataaaaatatttttactttagattttgaaaaggtatttgagggaagagaatatagaattcatccagaattttctatcttttatagaaagcccatggaagaacacaagaaggagaatagatcaggaatcataaatcgttttggaagagtacaattattggcaaatcttggtatagaatttcttccaagaaactcttcttttaaaacaaaaaaagaacaaaatagagttgcgattgatcaaaagaaagaaaacaagttagtgcgagagtttaatcaagaaaaagtaaacacatattttgaaggattagataattattatatttttgggatagatagaggaatcaaacaattggcaactttatgtgttactgataaaggtggagttattcaggattttgatatttatacaaagcactttaatagtggaagtaaaagatgggaatacaaatttcatagaaaagatggaatattagatttaactaaccttaagattgagtctgatagaagtggaaataaatatatagtagatatatctttatttcaggctaaagatgaagatggaaatcctacaggtacaaataaacaaaatattcaacttaagcaacttgcatatatcagaaaattacaatatcaaatgtctgcaaatgaagaaggagttttaacttttttgggaaaatataagaacaaagaggaaagggaacaaaatatgaaagaactaattactccatataaagaaggaaaaaattttgcagatttgccaatggatatttttcaagaaatgtttgaaaattattatagattaaaaactgatcaaaatttgtctgaatctgagaagaaaaatcttatgaagattactacagagcttgatgcaagtgaaagtttgaaaaaaggagtagtcgcaaatatgataggagtgatttattgtttgatgaaaaaatatgaatataaagtgaagatttctcttgaagatctttcaaatgcttggtttttttcaaaagacggactttctggaggtgttgtgctaaatacgaaaaatgatgaaacaatggatttaaaaaaacaagataatttagcacttgctggagttggaacctaccatttctttgagatgcaattgttgaagaagttatttaaaatttctaccgaagaaggaattttgcatttagtcccaagttttggaagtgtaaaaaattacacagagatttttaaggataaggggaaatatgtatataaacagtttggagttatttattttgttgatccaagaaatacaagtagaaaatgtcctgtttgtggaaagggaggaaaaaaatatatctcaagaattgataatgttgtaacatgtaagaattgtggatttgatacatcatcagacaattctattcttataaaaaataataaaaaacagggaaaaaaacttcattttataaaaaatggagatgataatggtgcatataatattggagagaagataagagaacttccaaaaaaatcagatgtaaagaatacctcgatttcaggaaatatttctttttcatag

SEQ ID NO: 300 - DNA, 3390 bp, Unknown
  metagenome-derived sequence
  misc_feature (1)..(3390): Unk70 with TGA>GGA
atgatggaaaaattaacaaatttatatgaggttattaaaaccattaaatttgaactcaaacctagtgaatttactttaaaaagatgtagttttgatagtagttttgaatcagatcctcatgttctatttgaaaaattgaaaccaatacacaaacaacaaaaagagatattaaacatattatcaaatcttcctccacaaaaaatagtaatacataaaaatttaataaagttaatagactcagattatttttacagattaaaatctaaagcccttagtgcaaataacacattagtagttcttagtaaagaatttcaagaagaattttcaaattatatcaaagaaaaatttgatagattacattcaaccaactatagtctttcttacttactttgggcagatagcttagaaaaaccaagcaatacagacaaaaaacccacaaaatcagaaatagcttttgctgtcaaaaggtatgttcatgctgtccaaaaagtagaagaaattatttctaatataatttataaaaccggaaatacagataatgagttaaagacaatgttaaaatcatattatgataataaagatttaggatatatttttagcatcgcaaatagatatttacaatcatatagtccaacaagtggattccaggtttcaaaatttggttttaatgcaaaagcaattagaaaaaaagtagatgtagaaaaaatggaaaaagaaattagaatactagaaacaaaaatgcttgatttagaagacaaaaaagtaatagctacacagatttttgatgattataccaaaaaatttgtacaagaaaaaataaaaactgatcctaaattagtagcacttagagagaatcaaacagctagtcctaatgaaagaaaacaagcaaaagaatatttgaaaacattaaaggaaggagattttaattatcaaaaaattctaaaagaaagatcaaaagcaaaaaaagaacaaaaaaagtacgaacctaaatttactggagataaagaatattgtgaacttaaactagcaaaaattgatgctagtgtcatatatggtagagcaaaaggagatttttttgcaaagcagcaagaactttattctcaacaagcattatcacattacgcaagacttgttagaaacggagaaaaatattttgtggtaatgatagatagggataatattaatgaattagataatttaggagacaatcagataaaaaacgatgattattttgagattttgagatactcttcactaacagctaaggcagtagagaaacttatttttgaaaaaaatgctctaaattttaatcgatatgataaagaatatagggattgtaaaaatatccgagaaaaaagaacttataaagagaaaggaagtgaagattctcgttcgataaccaatgatcaaaaaacaaaacttagaaagctagtttcttttttgaatgaagcaataactcaacttaataaaaaagttgaaggaggagtttttaattgggtaccatttaatatatccaatgagtttgacgactttgctgagtttagaaaatatgttactaaaacctgttatataacaaaatgggaaagtattagtaagcaaataatttatgatcttgataaaaaaggaattttagacttttatcagatttacaacaaggattttgctgtagatccatattttgctaaaacagaaagagataaaaatcgtattaaaaaagatataagtataatgggaaaacaaaatctttttacaatatactgggaatctttatttggagataattctagtaatattagattaaatccagaatcaaatctttatgttcgtcctgctaaagttgttgaagaaatttctgatcataatcccaattacgaaacaagtaaattgagatataaagaaaacaaaataatcggagattttcaacttgtattttatccaaccaaagagcttcctcttgataaattgcaaaagaaaatcttggatgaggtagataaatcatatgcaataggtattgatcttggagaaaatagcttagctaccatttgtcttattgataatgaaaaaagagttgttttggatgaagaaggtaagccgattatcaaagacctttctatgataaataacaaaggagactttgtggaattagatgattgttatattgatggacaaccttataaaagaaaacaaaaattattagttggaggacaaggaaataaaccatacactttagggcgatacttccctgaaaaattccaaaaccaagttatctcaaaaatgtcaaaagaaacattaattgaagtgctaaaaatactggaagatatagcaccagaaaagcttggaatcgttgataatcatggaaacaaagtatttgattacaattatgcatttgaacacttaaaagcaactaataaaattagatatcatttacaagcatttgatcacactaatgaagagatggagattctagagaaagatttattggcaagtactaaaatcagaggaggatttgttggaaaagtagtttcttatattactcaaatgtcaaaaaaatataatgctcttattgtatttgaaaatttagatcaagaaattggtcgtattagaggaatgacattattttcagaacaggaatatgaaaaagtatccgcaaaagaagaaagaatgtataaaggtatttcaccatatcaattgatacaagacaaaattatacaaaagtgtaattatcttttatctaaacaagataacacaaagggaattcaaatttcacctagattaaaaagacaagaagatattaagcaactaactttattaaaagataaaaattgcgcatggggaaaggttgtttttgttaatgaagaaaattcttctaaagaatgtcctgaatgtggatttatcccaggaaaatattcaagtaacataaatattcaagagaacggaattgaaattatggcaaacaaaaaagataaaaaacttttattatttgaaaacaatcctctgctaaatgaaagacgaattgcgtatcagagtataccagatacaaacgaattaaaaaagaaatctctgttgatagaaactagggttggaaagacaattttaactgaaacagatatgaaaattgttggagatccaatgatttgtgtaaattgtggatatgacactagaaaagaagagtgggtcaaaaaatataacttaaaaagttgtgatgaaattgcagcatatattattgcaaaaaggggattagaatttgttgaaaacaagggatatgaaaaccaatcaatcgacaagcccagtcaaactaacacatttgaagagaataaaaaatcaaaaaactctgataatgaaaattcctcatatacaatgtctggtaatattaatttttcacactcttaa

SEQ ID NO: 301 - DNA, 3408 bp, Unknown
  metagenome-derived sequence
  misc_feature (1)..(3408): Unk71 with TGA>GGA
atgctttcaaaaaaaaacaaaaaaggaattaaacaacctcaagcaaatcaaatctctttatcatctttacatgataaaaaggatttaataataaattattgggagaataatatttcggaaagcgattttttaataaacatctttgaaccaaatttaaaaaaatatttagatgcacttgctaatcctgataaatattcacatacaaagcctgatttgatagactttagaaaaacatttctacaattattaaacgtaaacaaagaatatttgcaaccattatttgataaatctatcatatttgaaactggaaaaaagggagagtctaaatatataaatgagattaatgagtttgctggaaatgaaaacaatttaaaaattaaagaattactagatttaggagaaaaaattagacaatattttgaatctaacggactacaagttccttatggaagagttagtttgaactattatacagcggtgcagaagccaaacaactttgatgatgaaataaaaaaaggaataaaagacctaggaattatagaatttttaagaaaagaggaaagtgaaatacaagtttatttaaatcaagaatcaaaagaaaaaataaaattattaaaagattccaaagaaccttattctattgagttaatacaactttttaaaccgaaagccattcctttttcagtaaaatacaatttagcaaaatatatagaaaaaaattacaaaaaggagcttggtttaaagtatgaagatattttgtataagtttgacttacttggaagatcttatgatattggaaaagattattctgaatgcacagaaaagaacacattttcacttatgaaatatccaattaagttagcttttgattattcttgggaaaatttagcaagaagcttaaaaagggacatagattttccaaaagaaatttgcaaaaactttttaaaagataattttgatgtagatataaacaattctagttttaaattgtatgcggatttattatttattgctgaaaatttagcaaccatagaatacaataatccaagtaatgaaaaagagattatcgataacatcataaacacctttcaaatcataaattttgaaataaatggatataaaaagaaagactatgaaaatcataaaaccgcaattttgtctttattggaacaaggaaagaatgaaagagactttaagagcaatgtttttatcgaagcaaaacagaaactaggactcttgagaggaggacaaaaaaatctaattgcaaaatataaagaactaactgaaaaactagttgataaaaaggatattcacatcggaatagcaagttttataggaagaaatttggcgaatataagagatggattaaaagaggaacatgaactaaataaaataactgactatggaataattgttgaggacaacaataatgacaaataccttttacttttaagacttgctggaaaagataatagagagcaacttaaaagtaaattaggagatggcgagataaaagtgtatgagattaattcttttacttccaaggcattaaataaattcatcaaaaaccctggaggagaagatgcaaaaaaatttcatggaaattttaattataaatatagagatatttcaacttattctcatgaaggaaaatggattggttataaaccggattttattaaacatattaaagattcgctttgtaattctgaaatagcaaaagaacagaaacgggttgagtttggatgggattttgataagtgtaatacctatgaggaaattataaaagaaatagattcaaaaggatataatttaataaacaacactatctcaaaaaagaatctcgaatatttaattgaaaatgataattgtctattactccctcttataaatcaagatatttctagtaaaaaaacaataaataaaaacgcttttaccattgattttgaaagagccatagatggaaagtcaggatatagaattcaccctgaatttagtgtcttttatagaacacctatgcaagaatattcaaaagaaaataagtttggaattgttaatcgttttggaagattggaattgttggcaaatattggaatagaatatgtgccttcaaacaaaaattatactactaaaaaagaacagaataaaatctcattagataaagataaacaaaataatttaataaaagaattcaacgaagaaaaggtagataactattttgatagtttggataatttctatgtttttggaatagatagaggaatcaaacagttagctacactctgtgtaatggataaagctggagttattcaggatttcgatatttatacaaaacatttcaataatactcagaaaaaatgggaatataaaaaaaatagaactgaaggaattttgaacttaacaaatttaaaagttgaatcagatcaaaacggaaccccatttctagtagatatttcattatttgaatcaaaaaatgaaaatggaaaaagttttggaactaataaacaaaatgagaaattaaaacagttggcttatgtaagaaaactacagtatcaaatgtcatttaataatgaatcagtattaaattttataaaaaaacatacgactcaagaggcaagggctgagaatataggagaactgataactccatataaagaaggaaaacaatttgccgatttacctatagatacttttgaagaaatgtttgaaaattttcatcagctaaagacaaatgaaaacttatctgagttagaaaaacaaaatttaatgaagcttactactgaacttgatgcaagtgaagaattaaaaagaggagttgttgccaatatgattggggttatttgttatttaatgaaaaaatatcattataaagtaaagattgttcttgaaaacttatctaatgcttggtatttttctgaagatggattaacaggagatgctttgctaaattcaaaaaatgatggaataactgattttaaaaaacaagaaaatcttgcgcttgctggagtaggaacttatcatttttttgaaacacaacttttgaaaaaaatatttaaaatatctattgaagaaaaaatccttcatttagttcccagttttggaagtgtaaaaaattatacctatctaataaaaaataataaatcacaatatgtatttcgacaatttggtattgtttattttgtaagtccaaagaacactagcttcaaatgtcctatttgtctaaaatcaggaagagaatacataacaaggaacgataatataataacttgtaagagttgtggttttgtttcaggaaaagacaatgatgaaatattaaaaaaatataccaaaactcatctcaacatacattttatcaaaaatggagatgataatggggcgtatcatataggaaaaaaactgctgaaatag

SEQ ID NO: 302 - DNA, 3528 bp, Unknown
  metagenome-derived sequence
  misc_feature (1)..(3528): Unk75 with TGA>GGA
atgcaaaaatatgaagtaaaaaagactgttaggtttgagttgttaccaaaagaaaatacatcaaaaccagaaatcaataatcaagattatgaaaaaaatttaaatgaatttataaaatcgtatgaagaggctttacataaattgcaaaaaatattgtttaaagatgacacacttaatgaaaatttaaaaataaaattatcttttcttgctaattatacaaaatatgaattttacaagtatgatattgttttactgaaaaaaggaacaaataacaaagtatctctaagctctgaaaaactaaaatatttgtataatctacttaaatccaaaatagaagaaaatctaaacttacttaagaaacttaaggaattactaggcttaccattggaaaatcaatctagaaaaagtgaattaaatttttatttttcaaaacttactacaagagataattttgaattttttcaccaattagctaaaaatctatcttctgaaaagccacattttgcaaatgaaattgaaaaaattatttcaaaatttgaaaatattgaaaacaataatcttatggaaaaactaagcttagttttaaaatctactggaacatttggagttgagatactaagagctagcttaaattactatacagtaaataaaaagccaaaagattatgataaaaaaattttagaaaaaaaagaagaatttaataagcttataggaaattttaaaaacaaaaatggtaaaaatatttttgacaataacatagctcaaaatagtggatttaatagttttttggaagattttgatgatagttattttggaggaatcaaagattatcaaggaaataccaagaaagaaaaaaagtattattatctttctatccaaaatgcttatgatttgatgaaacaatacaaagcagaacaaaaacaagcttttatacaatttttggctcaaggaaaaaattttgaagatttacaaaatgaatttgaataccatattacaaaagaaaagacaaaaaatgttaaattaaaattgttttatggtataaaagaagaagatttcaatacaatgaaagaacttactaaacaaattgcagctcttgtaaaatttaaaaatcaattaaaacaaaaattagatgatgaaaagaaacaaaatttagaagctgaaatagacagttacaataaaacttatggaaccaattatgatttgtcagatgaaaatttgctagaaacaattggaaaagatttggaaaaaatagccaaggaaagaggtaaattttttcaagaaaaattatcaaaatataaaaattttgctgaagaatacaaaaaagtagctcaaactcttggaagaataaaagcaaatattgtttctttggaaaaagaaaaaatagatgctaaaaaacttacacattgggctttgatattggaaaaagataatcctttacaagaaacttgtagaactgactctaagtataaagactgtaaactacgttatttattgtttattccaagggaaaaaattagaggagctagaaaatttatggataaactaaatccaaatccaaatggaaaatggactttgtataaatttgaatctttgactttaaaagccttaaaaaaactttgttttggtaaagaaaataatactttcagaggaggaatttatgaagaagctaaaaattacccagaacttttaaatgaaaaaggaaaattaaaagaactttatgaaataaagtctgatgaagaactaataaaattttatcaaaaggttttagatttagagtctactaaaagacaaataaaacttgaatattttgatgaaaatgaatttaacgaagaagttgtaaatgcagatattaaaactttgaaagaactagaagaaaagcttaaaaaaacagcttacattaaaaaacctataaaaattacagaaaatgtaaaaaataatttaattaaatacaacaacggacaatttttcaaagttacaagctatgatttacaaaaatatgaccctgaatttatcgaacagttagaatacaaagaccattttgatagaaaccatccagaatcttttacacaattatggtgggatttttggactgaagaaaatgaaaaaaatggataccctgtaagaatcaatccagagctaaaagttagttttattccaaagcaaaacggatttgataaatcaaggtatggaagagatagatttattgttgcttttaatatgtctataaatgctttagctggagaactaaatttgtcattcaaagataaagatgaattaaaaaacttttttgaaaattttaaccaggaaatcaatacagagtttaaagataaaccttatttttatggatttgataaaggagaaaacgaaatcattacaatgggattatttaaacttgatgaaaatcaaaatgagcaaaaaggagtaaaaatcacagtatatgaacttaaaccggaatattttgaaaaagaaattgacggaaaagttgtttataaaaatttatcatattttcagtatgatggttatccacaattttacaaagaaaaagaagtttcttgcttaaacttatctatggcaaaactaattaacggaaaaatttatttaaatggtgatatggctactttcttaaaacttaaaaaaatagcaggaaaaagaaaaatctttgaaatagttgcaaacaaacaagctaaaagcaagcaaataatagaaaaagacggaaaattgtatattgatggaaatgaaggtaaaagagaaagtttatacttatttgatgagaaattaggaaatttggaaaataaggaaaaaatcaagcaagaattacaacaatatttggataagatttataatgatttaagcaaagaggaagtgagtatagaagaagtaaacaatttaagaggagctattgcttcaaatatggttggaatagtaaatcatttattcaaaaaatatcctggctattttgtgtttgaagataaaactattgaagataacaaaaatcgttttgaaaaatacaatattacaattggaactatttttgaaagaaaactattacaaaaatttacttataatggaaccgtgccaccaaattataaattattttttaccttaaaagatgaagaaaacctaaatcaaattggaaattttatttacattccagaaacaaatacttcaaatgcctgccctgtttgtagtataggaaactttttgaagaaaactagaaatggaaaaatagaagttgataatgaaaaaatttataaattatttggtcacggatatggaccagaatttgaaaatagtatgcatcatttatcaaatgaagaatacgaaaaacttaaaaatgaaggaatactaaaaggagatgacttaaagaaaaataaatatcaacctggagaaataaacggaaaagaatgtgattatcatatgggtaaaaataactatggatttaactatttacactctggagacgacctagccacatacaatatagctagatttggatttgactatttaaaaaatatccttaaaatctaa

SEQ ID NO: 303 - DNA, 3585 bp, Unknown
  metagenome-derived sequence
  misc_feature (1)..(3585): Unk76 with TGA>GGA
atggaaagttttaaaaatatttatgaggtgaggaaaagtattaggtttgagttgaagccttataatgttacaagagaaattttaaaaggtgataatgattatggaaatttagattcaaaaattaaacatataaaaaaaggagaatttgaagaaaattttaattggaatagattttgtctaaatggatatagtaattttttagaaaaatctaaatcttttttaacttttttagaagaagtaaatttagaaataaaaaaagaaaattggattaaaggaaaaaaagatatatattttgattttaaaagactaaaaggagtttttaaaaatattccttctctgaaaaaaatagaaaaatttgataacaattttaaagataaattatatgaaattgaaaaggaatataaaattctttttcatatatttcaaaagttagaaaataaagaaaaaggagaagctaatgaaaaaaaatcagaaatttcaaaatatttaagaaaaatatcatatttaaatagaaactttttaactatttttaagttttttgatgaatataaaacagataaatatttatttgataattataaaaaattattagatgaaacttttgaaaaaataaataattcaattatagcaagtaatgaaaatgaaaaaacaggttcttgttttggaaagtttacttttaataaatattcactttttagaagagaaactgaaaatttaaaagataagtattataaaaataaaaaattattagaagaaaatgtaaaaaatatagtagaaactaaaaaaataaaagatgatagagaaaaaattatagaaataaaattagaaactattctagacttaaaacttgaaaaagaaaatgaaaaaattcaagaaagattagaaaaatttaattttgaaagaaatttagatgaagttatttctgaattagattatattaatggaaatatattaaataattacattcaaaattttattaaggattataaagaaaataaacaaacattaatttttaaaaatgaatcatctaataaatataataaaggaaaaattattttaaataataatgaatataatatttctgcattaagaggacaaacattagaaggaggagaatatttaactttattaaaaaaagactataaagatttaaataaagatgaaaaagaagaaaaaaggctagttgataagtttttaaatattattttaaaaaataaaaatataaataaagattttgatacaataaaaaattttagagataaattagctaaatatagaggaaagttaagacaaaatttttcagctagtgaaagagaattcataaatgaagcaatgattaaatattatgctaaaattttagaaaaagatggaaattattttttagctttaactgataaaaataatattttagataaaaatataaataatataaaaatagataaaaatataaaaggaaatattttttcaaatacttttaatatttataattattctcatctacattttggagcattagaaaaattatgtttgatgggagatggagatttaataaaaaatgatggactaattaaacagtggaataaatataaaaatcaaaaaaataatataaatggaagatgtgctatacatcaaagatattttgataaaaaatgtgaaaattgtaaaaatgataaagaaaaaaaagaaaaagagtttttttctagttttcaaagtcatataattaaaagtttatataaattaaaagagaataatggagaggattggactcaatatattacagaaattgaaaaattagaaactattgaagagatagtaaaatttattaattcaaatttttataaattagaaaaaaaagaaattaaaacagaggaaatttttgaattagcagaagaaaatgaagttgaattatttcaaatttatagtaaggattttaatatttttaatgaaaagtttttatctggagaagaaaatttaagaattttaaaaagtggagagggatatagagaagataagaaagaacatggagaagaaacaaaattaatatcaaacactaaaagaaaaaaagataaaaagaaaaatttatttactatttattttgaagaagtatttaaaaatagagatacttttttaggacaagaaggaggagtattttttagaaatgcaaatttagaatcagataaaaaaagatttagaaataataaattttttgttagttttgatattaaatttaataaaggaacacaaaatgataatataaaattatgtgaaaaaaaagaaaaaattttagaagaacatataaaaaatataaattatattacaataagtaaattaaaaaatattaaagatgaaaataaaatttttattggattagatagaggagaaaaagagcatataagttatggaatatatgatggaaaattaaaatttcaaggaaaaataggacatacaaattatgtaaagaaaataggaaaagaacaagaaaagtttcaaattttagagcaaaaagattatgaaaatattactttaaaaataggtaataaaataattaaaattgaaaaacctatttataaacaattgactacaactcataagtattttgatgaaaatggaaaagaagaaataaatcttttagaattaaatggattacaagaatatcatattttatatatatttaaacaaggagaaaatggagaatattttgtagatttggaaaatggaggaaaatttattttaaattctaaaaaatatggattcactatcttagatagaaatggagaagagattaaaataatagatggaaatgatggaaaagaaataattgattattacttattatttgaatcagaaaaatttaaaaggattctagagataaatgatgaaataaaatattctgaaaatatgtttaatttgaaaaaaggatatatttctataattaaagatttttttgataaaattatttttgattataaaaaagaaggaaaagaagtaatttttatttttgaaaatcaaacatcaaataaaaaagatatttcaaataaatatttaggatctacaattctttcagatatagaggaaaatattataactaaatttaattatttaataaataaagaaagtaatgacaaatttcaattaacaccaaaaattaaaaaagaagatattttatttaaaaataataatatttatgaaatgtttggaaattgtatttttataaatcaagataatacatcaactggatgtccaaattgtaaaaaaatatttttaaacaaaggaaaaaagggaaaaatagaagaaattcctggaaatacactttttggacatggaactggaaataatgaaggaaatatgaaacatttaacatatgaagaatatgataatttgtatgaaaaagatgaaaaatttaaaaaaaatcatacaaataaaaacggaaaaaaaatacaaaacaaatatttagctttaaataattgtaaattttatttgcaaaatcaaaatttttcagaatttaacttcataaaatctggagataaccttgcaacctacaatatagccaaaaaaggactagaatatataaactctctaaactaa

SEQ ID NO: 304 - DNA, 3450 bp, Unknown
  metagenome-derived sequence
  misc_feature (1)..(3450): Unk77 with TGA>GGA
atgcaaaaatatgaagtaaaaaagactgttaggtttaaactgattccaattattaaaaattctgaaaatcttaaggtaagtttagaaaaacaaataaatctagaaaaatttataaaaaatttggaaaattacttaaataaattcaaaaatacttttttttatgataaagaaaaacatatttttaaaaacaaaattgaaattaaatataaatggctacaagaatttacaagaaataatttttatgaatttttgaataaaaataataaaaataaaaaatataagctatctgagataaattatttgccagttatttttaaagatagatttcaagaactagaaaatattatcaataacttaaaaattattgaaaatctaccagaagaaaatcaggaaaaaagaagtaaaattgcttactttataagacaattagctaaaaaagataattttgattttataacaagttttataaaatatatatcaaattcaaacaatccatacttagataaagatttaaaaaatttacaacaattagcagattttttgaaaaatgatttattactacttataaatagttatctaccttctcaatcagctggattagaggtagtaaaagcaagtttcaattattatacaattgataaatatagtaatataaattttgaagataagttaaatgaaaaaaaagcagaacaaagacaaaaaataaaagaaataagggataatgataggtcatttagtaaaaaattttatggacaaagtataaaactagatgagaagtttttcaataaaataggaataaaagaaaatttatatgaaaaaacattagaagaagcttatgactttataaaaaattttaaggcaaatgcaaaaagtcatttaatatcagatttaggaaaagaagaatttactacttatactaaatcttttaatacaattaaaaaagaagaaagaaaagattatatacaagatgcttttgatttaacttatgaaaattttcaaaaagttcatcctttatttgatatgacagaagaagattttaatgaattaatgaaattatctaaggaagtaagagagttagctaataaaaaaaataaaattttacaaaattatggagatattaaatcaaaagaacttgaagagaaaatacaaaataaaaaacttaaaaatcaagaaataacagaagaagaaaataaatttttagaaattaatgaattactaaaaattaaaaaagaagaaagaggaaaattttttaataaacctggacaaaaagtatatacaaaaaattattatttattaaatgagctatttaaagatatagctatcaaaagaggatttttaaaagcagaaatagctggaattgaagaagaacaaaatcaagctagattattaaaatattggtctttaattacagaaaaagatggagaaaaatacttaattttaattccaaaagaaaatagaaaagaagtaaaaaataaaatagaagaacttaataatgacggagatataaaaatatattattttaaatctcttactcttaatgcacttaaaaagctttgttttaagaaaattggaaatacctttattaaacctgtttttcaagaattattgtttaaggatgataataaaccttattttaaaacaaataaaagaggaaaaaaacaacttaagagatatgatgaattaaatgaaaaagagcttattattttttatcaagatgtgttaaagtcagaagctgcaaatagacaattagatttagttgattttggagaattaaataaaatttttgaaaaagattatagaaatattgaagagtttagaatagacttagaaaaagtatgttatacaaaattggttaaaggaatagatgattataattacaacaaattaataaatgaaaataatatcatagaatttaagattacatctcaagatttgaaaattttagaggaaaaagacgaaaaaatctttccaaaacataaaaataaagaacacacacaaaaatggttaaacttttggagcaaggaaaatccagaaaactattatcctacaagattaaatcctgaaattaagattttatatagagataagcttttagaaagagaaaatggaaaaaaagaaacaagatttaacaaagaacaatttactttatctactactttgggattaaatattcctagcaaaagacttgaatttagatttgataaaaccaatactatcaaagaaaaagttgagttttttaatgaaaaatttaacaaagaatttaaaggagaatggaattacggaattgatagaggaataaatgaactagctacattatctattataaaatggaaagatgaaacttatacttacaatggaaaaactatacaaaaaccagagtttgcaagaataaaagtatataaattaaaagatgagaatgtaactggagaggtagaaaaatatgacggaacaaaaaaagaagtaaaagtaatagacaacatttcttattttacaggccaagaaaatttatttgaaagctttgaaactggagtaatagatttaacacaagctaaactaataaatggaaaaattatcttaaatggagataaaaatacttatatgaaattaaaattattatcagctaaaagaagaatatttgaattatttgcaaatggaaaaataacagaattaaaatttgaaaggggaaaaaatatattattttttctagataaagataattactattatcctatttattggtttacagaagaacaaaaacaaaataaaagtttaattgatgaaatagaaaaaaaacttaacaattactttaagtatatacaaaaaaataacctttttgaagataatgaaactatagaaaaaataaatcatttaagagatgctattactgcaaatatagttggaataattaattttttacaaaaacaatttccaggaaaaatatttttagaaaatttagataaaacattactacaaagagaaaaattttcatataaaaaaggaaatgatggagaattaacacaaattgaagaaaaaatgatagatggacattttcagcaatcaaatactgatattagtagaaggcttgaatggggattttatagaaaatttcaagaagatggacttgttccatcaaacttaaaacaaactatttttctaaaagatgatttcggaataaatcaatttggtataataaattatgtagaagtaaaaggtacaagctctatttgtccatattgcgaaaaaattactgaaaataaaggaggactcaaaaatcatataaataaaaatactgacgaaaatcataaactaaagcctaatttatcaaaaattgaagctaagaattgtatatataaagagctatataacaagaatttacaacttaattatgatagtatagctgcctacaacatagccaaaagaggatatgagtattttaattctttaaaataa

SEQ ID NO: 305 - DNA, 3522 bp, Unknown
  metagenome-derived sequence
  misc_feature (1)..(3522): Unk82 with TGA>GGA
atggaaaaaatgcaaaatttgtttgaggttaggaagagtttgaggtttgagttgaagccttataaaattacaagagaaattttaaaaggagaagataattatggaagtttgagttcaaaaataaaacatataaaagaagatgaatttgaaaaagaatttgattggaatttattttgtaaaaataattatagtgattttataatacaatctaaaaaattaagtagttttttagaagaaataaatatagaaataaaaaaagaaaaatatggtaaaacaaaaaaatcagtattttttgactttaaaagattaaaaggaatttttaaaaatattccttctcttaaaaaattaacatattttagtaaagactttaaaaataaactagaagaaatagaagaaaattataaaataatatttgatttttttgaaaaattagaagataaagaaacaaaaaatgaaaaaaaatctgaaatctcaaaaaatttaagaaaaatatcatatttaaatagaaactttttaactatttttaaattttttcataaatatgaaagtgatgactttttagttgaaaatttagaaaaaataaaaaatgaaattggagaaaactttgaacaaataaataattcaattattgcaagtaatgaaaatgaaaaaactggaacttgttttggaaaatacacttttaataaatattcactttttagaagggaaacagaaaaattaaaagatagatatgaagaaaatagaaaattattaaacgaaaatataaaaaagatagttgaaactacagaagaagacaaaaaaataaaaaatgataatggaagaaatgaaaatataaaattagaaactatcagaaatttagaattagaaaaagaaaatgaagaagttcaaaatttattaaaaaattttaattttgataggaatttagatgaagttatttcagaattagacaatataaatggagttattttaaataattatattcaagaatttattaaagattataaattaaataagcaaaatttaagctttttaaataaatcatatagtaaatataataaaggagaaataactttaaatagtaaaaaaatatttattaaagtaatattgcaaacattagagggaggggaatatttgcatttacttaaaaaagaatataaaaacttaagtaaaagtgaaaaatatgaaaagaaattagttgatacctttttaaaaattatttttaaaaataaagaaataaataaagattttaatacaataaaaacttttagagataaattagcaaaatatagaggaaaaattagacaagattttagagcaagtgaaagagaatttataaatgaagcaatgataaaatattatgctaaaattttagaaaaagatggaaattattttttggctttaactgaaaaagagaaattaaatggaaacataaataatattgaaattgaaaaacatataaaaggaagtatttcttcaaatacttttaaagtttataattattctcatctacattttggagctttagaaaaattatctttaatgggagatggagatttaataattaataaagaattagctatagaatggaataaatacaagaatcaaaaagataaaaaaattaatattgattttaaaaagtttcaaagtcatataattaaaagcctagaaaagttaagagatgatgaaaaatataatggagaaaattggactaattttatatctaaaattgaagaattaaaaactattgaagaaatagtgaattttattaattcaaatttttataagttagaaaaaaaagaaattttaacagaaaaattatttgaactagcaaaaaacaaagaaattgaattatttcaaatttataacaaagattttaatatttttaatgatgactttttatctggagaagatgaatttttaaaagacttagaaaaaggaggagaacatggagaagaaacaaaaacaataaaaaatacaaatagagagaaaaagaaaaagaaaaatttatttactatttattttgaagagatttttaaaaatacagatacttttttaggacaagaaggaggaatattttttagaaaaggagataaggaatttgaagaaaaaagatttagaaaaaataaatttcttgttacttttgatattaaatttaataaaggaaaacaaaatcataatacaaaattatgtgagaaaaaagataaaattttagaaaatcatatagaagagataaataaatatactttagaaaaaataaaaaaaatagattcagaagatttaatagttgttggaatagatagaggagaaaaagaacatattagttatggagtttatgatggaaatttaaactttaaaggaataattggaaatacaaattttataaaaaaaattggaaaagaacaagaagattttgaaattttacaacagggagattatgaaaatataactttaaaaataggagataaaataataaaaacagaagaaagcatttataaacaattacaaacaacatataaatactttgagaaaggagaaaaagcagagaaagttgaggaaggatatatattagaagaaggagagaggttattagaattgaaaggagcagaagaatatcatatagaaaaagtgtttaaacagggaaataatggaaaatattttgctgatttagaaaatggaggaaaatttattttaaatacagattcttatggatttactattttagataaagatggaaataaaattaatatagttgataaaaataatggaaaagaaataattgattattatttattatttgaagcagaaaaatttaaaagaatcttagaaataaatgatcaaattaaatattctgaaaatatgtttaatttaaaaaaaggatatatttcaataatcaaagatttttttaataaattaatttttaattataaaaaagaaggaaaagaagttatttttatttttgaaaatcaaacttcaaaaaagcattctattggaaaaaatgaaaatgaaattacaaataaaaatttaggagcttctattttatctgatatagagttaaatattataactaaatataattatttaactaataaagaagataattataaattacaattaacacctaaaataaaaaaagaagatattttaactggaaaaaaaggagataatgaagaattcaattttggaaatatattttttattaatccttctaatacatcttctagctgtcctaattctaaatgtttaaaaacattatttgggcatggaaccggaaataatgaaggagatatgaaacatttaacagatgaaaaatatgataatttatatgatagtgatgagaaatttaaaaaaaatcatactaatgataaaggaagtaaaaaagaaaataaatacttagctggagataattgtacttttcatttacaaaatccagatttttcaaaattcaactttataaaatctggagatgatttagccacatacaatatagttaaaaaaggaatgaaatatataaattctctctaa

SEQ ID NO: 306 - DNA, 3078 bp, Unknown
  metagenome-derived sequence
  misc_feature (1)..(3078): Unk83 with TGA>GGA
atggaaaaatttaaaaatatttttgaagtaagaaaggctttgagatttgaattgaaggctagtaaaataactagggaaaatttagaaaaagaaaatatttataaaaatccagtaaatattttatataaaaataaacttgaaaaaggattaaattattcaagaacagtttttgaaaatgatttaaaatattttttagataattcaaaaaatattattttaaatttggaaaaaataaaaaatttgcttgataatacaagattttctgaaatttttgtggagaaaaaaatttttgaattaatagataaagatttttacataaaatttgctaaaaataaattatctggaggaagaagttctagtttacaggaaataaaaaagaatttagattggaaaggaataaatttaataaaaaattattatttagaaatttttgaaaatattgaaaatttaataattagtattgaaaatttatcagaaaaagaatcaagcttttctaaaaatgagataaaaaaatttttaaggaaaattagtttagaatttattagaatatataattttttagaaaaatttgatataaaaaataaggattttaacaagaacttaaaagaatatattaaaaaagtaattaattttaaaactttttttgaagaaataaaatcatattattttataagtgaaaatcaatcaagtggaattttagttagaagatttggatttaatgaaaagtctttaaaaagaagacaaccaaaagaaattaaagaagaattagaagaaaatttaaaatcttttaatgaaaaacttgaaataaaagaaaaattagaagaagaaaggcaaaaattaatacaagattttgatttaaaattaaaaacagaaaaatttgaagagttattacatccagagaaatggtcagaaattaggaaaaagaaagaaaaaacaaaagaagaacaagaaaaattagatgatatagataatcaatttaaagaattaaaaaaattaagaaataaagatgaagaaataagtaaaaaaacacaagaacttaatagatataaaaaagatttaggaaatttaaaagtaaaaataaataatttagaaaaagaattagaaaataatttagctttaactcattatgctaaacttttaactaatgaaattaatggagaaaaactatattatttagtattaattcctattgaaaataaatttattttagatgagtacatttctgatgagggaaatttagaaattttagagtataatactttaacattttcagctttaaagaaactagctttaagttatgatggaacaatgggaatttattgggataaaaaagaagaaataaataaaaagtctaatttaaaaagatggattgttgatttatatatagatttagaaaatggagaaagacaagaagaattttataaaattaaaagatatgtaataaatctaataaagacttataaaaatatttttggtaatatttattttgattttaaaaggctttatgatactaaatctttagatgaattcaaaattgaatttgataaacaaggatataatttaaaatggaaaaatatagatttagaaataataaaaaaattagaaaaagagggaaaattagaattttatcaaatttacaataaagatttttataaaaatcctgatttttttgatatcccttactctataaaagaacaaaaagaagaaagacaaagaagaagaaaatcacaaaatgtaaaaggaaataataatttatttactatttattgggaaaattttataaatgatatagctaatggaaatgaagaagtaagactaaatagtgattgtggatattttgtcaaattaaaaaaagaagataaagaaaatcatagatatgatagaaataaaataattggaaattttggattaatatttaatccaggtaaaaaacttacaaaaaaatatgatgaaaaagaaaatataaaaaaatttaatgaaatttataaaaaagaaataaaaaaagtaaaaaataaaagctttattggaattgatagaggagaaaaagaattattaacattttgtttaattgatgaaaatggaaattgtataaaaaataaaaatggagaatatataattggagattttaatttaattaataataaaggagattttatacctaaagacaaatgtaaatatatagatatttctggaaaagaatataaggatttattaggaaattttttaccagattttacacatcctgaaaatataatttctggaaagaaaagttttcaatttgatgatgaaaaaaatttatattattttaagttaaatcataatgctagactttatttactagaaggagaaaataaaagatacaaaatagtaaataaagaaggaaaagaaatatttttgaaagatgagaatggaaataatgttatagattattatttattattccaatcagaagtatataaaagacatatcttaaaaaagactggaaatataaaattagaggatgttcaagaattaagaggaggatatatttctaatattataaaacagctaaataactggattgtaaaatataatggaattataattttagaaaaccttgataaaactcaaattgatgaaaaaggaaatatatataaaactaataaagaaaaggttttagaaaaaacattaggagcaactatttatcaagaaatagaaacattactaaatagaaagtacaattactttattttcaaggatcaagatattggaggattacaattaacaccaaaagtaaataatatttcagatattaaaaatctagaaaaatctaaaaaaaatgtaaatttaggaaatatagtttttatagatgaatatttaacatcaaaagaatgtccaatatgtaaaaatcaattgtttagagataaaaagaaaggagataatgtatatcataatgaaaaatatcctggaaataatggatgtagttttgatactaggacaaatacttacggatttgatttcatcaaatccggagatgatttagcagcttataatatagctaaaaaagggaaagaatatattgaaaatctttcaaactag

SEQ ID NO: 307 - DNA, 3360 bp, Unknown
  metagenome-derived sequence
  misc_feature (1)..(3360): Unk84 with TGA>GGA
atgttagaaagttttaaagatttatatgaggtgaggaaaaatgctagttttagattagaacctcaagaaaatgcagcaacaaatgaaaatttatataaccaagatgttgatttatctgaaattttaagcaagtacaaaaattttgtgtatgatttaaaaaatcttttgtatatagaaggagaaaaagtaactgaaaaagaaaaagataatgatttatctgtagataaattagattcttcaaatgttgtacatataaatcataaatatctttcaaaatatttttctaaagagttttttgaaaattatgatagaataataaaaagaaataaacacggagcaaaaacaaaaaactggactacaataggaaataatgattttcttgaagtattttttagatcattttttaacaatgcatttgaaaatataaataaacttcaagaacttatagacacaaaagaaaatgaacaaaaaagaaaagctgatatagcttttgaaatcagaagactattatcaagaaaccatttaggaaaaatttttcctctttttaaaggtggatatttaacacataaaaatgatataaaaactataccagaacttacaaatcaagcaaaagaactaaaagagttactagataatgcaaagatttattttctagaagattcaaattttggagttcaagttgagcatataagcctaaattattatactaggaacaaaactcagaaggaatacgatgaattgattaagggaaaaaagaaattattagattctccttacaataaagatatttcagaattatatggaattgatagaaatctaccaataaaacaactatatgaggaaatgaaaatgttcaaagcaagacaaaaaagtgctttctttcaacaactacaaagcaaaacaccttttaaaaagtttaaagaaccatttacttttactgataatgagggaataaaacataaggaatttagaacagagctatttttcgatgttgaagaagaatattacaataaaatgttagatttaacaaaaaagattgagaaatcaggaagcaataaatttaaaaaagaaagaggagattttttactatttcaagataaaggaacaaaaagttttaaaggatggagtggattttgttctgaatataaaaaagttgctatggaatatggaaaaagaaaagctgaaagtctatcactagaaagagaaaaaatattagcagaacaagaaagaggatggggagttttttctaaagttaataatgaattctatataaatacttttcctatagacaaagtaaaagatgcctatcaatcactttcaaaaaagaaaaatgatggagaattatcatattttatattaagttcaataactctaagagcattaaataaactttgtttttcaaaagactcaaaatttataaacaaagaaattcttataaagcttgataatgaatttttaaaagaaaaagaatataataataaaacaaaagaaatagtactaagaaaaaaatctgatttaacagaattaaaattaataaaactttattataatgttctagaattacaaaattctttaagaatttcatataaaaactcagattcatttgataaattgaaatcttcaaagaatttagaagagtttgaattaaatctaaaaaatgaaacttataaacttgaagaatttaaaactactgaagatgaatttaataaaattcttaaaagtaatgaaggaaaaagttacaaaatcataaataaagaaaaaggaaactttgaaaaatggtggaaaaatttttggaattcaagtaaagatggagagataagaataaatcctgagttaaatatttctttaagaaaaggaaatgaagattacaatgataaaatatctttccatagaaaaaaagatgatgtttatttattaaatgtaaatttttctcatttcgcaaatagaagctatattgattcttcctttatagaagatgataaaagaaaagaaaatttaaaaaagtttaatgatctttacaataagaatataaaacttaattatttctatggattagacaaaggaacaaatgaacttataactcttggtttatttaaaaaagagggaggaaaaataaaaagtgtaaatatttcaaaagaaattccagtatacagaataactagaaaaggattattacattcaaaagtcacttttaaaaaagctcctaaagagggacaaaacccaaaaactatacatactttatataaaaatccttccttgtttattgatgaattagacaatgaagagatttttgagaaagtaaatatagaatcatgtttaggaaatctaaattctgcaaaacttataaaaggaaatatcattttaaatggagatattcttacaaatttaaatcttcataagctatcagctaaaagaaaattatatatagcaataactgaaggaaaaactataataaaaaatatcggatttgatgaaaaagaacaagaaaatggagcatttttttatgaatatataaataaaggaaaaacagaaaaagaacctgttttttatataaatgaagaattcttaacaatcgtaagtttagatgaattaaaaaatgaacttaatgaatatataaaatatattaaaaatgaaccaaatgaatataaaaaatatatgggaaataatgcattggacacagatatttcaatgttagcaataaataaaataaaaaatgcactttgtgcaaatattattggtattattatgaagcttcaagaaaaattccctggatatgtttgttttgaaagcttaagtaacgataataataatagagacatggaaaaagaacactctttcttaggaaatcttataaatgataaactttacagcaagctaaatataaatgcttcagtacctcctattttaaaaaaatttcgctcagaactaaaaaattcatattatcaatatggtcaagttatatatgtaaatgaagattctacatcttctgcttgtcctgtttgtaatgataaatttataaaaggaattaataaaaaaggaaatttagaagaatataaaaaaaacaaactttatggacatctaactgaatctgaaagttctatgcatcatttaacagatgatgaatataataaaaaatatgataataatgacaaatttagagaaaaacatacaaatgacaaaggaaagaaaaaagataatatttacagaagtggaaatggatgtaactatcatatgaaagacaatcctaaaggatttgatttcatcaagtctggagacgacctagcaacctacaacatcgcaaaaaaagctttggaatacttagaatacctagaatcccaaaacaacgatgaaacaaaataa

SEQ ID NO: 308 - DNA, 3474 bp, Unknown; identical to SEQ ID NO: 281
  metagenome-derived sequence
  misc_feature (1)..(3474): Unk86 with TGA>GGA

SEQ ID NO: 309 - DNA, 3390 bp, Unknown; identical to SEQ ID NO: 300
  metagenome-derived sequence
  misc_feature (1)..(3390): Unk87 with TGA>GGA

SEQ ID NO: 310 - DNA, 3900 bp, Unknown
  metagenome-derived sequence
  misc_feature (1)..(3900): Unk90 with TGA>GGA
atgatcatggtaaatctagaaagttttaaaaatttgtatgaagtgaggaagaccgtcagattcggattaaatcaacctaataagaaaagtaatattaataaaacgcatggacaattaaaagatttggttgacctttcttttgagagagaaaaaaaattaattaataatgaaaaaaatcaagtattaattgattcagagaaagctcttatagagaaattacagcaatatgtaaatggactagaagtacaactagaaaactgggaaggaacatatcaaagatatgatttaatagctataaataaagactactataaaatattggcaagaaaagcaaaatttgatgctatgtgggagattagtaaatttgataaaaaatcaaataaatatataaaagttaaacaaccccaagcaagccaaatttctttatcatcattaaagattggaaatagaagtgatagtattattcaatattggggagagataattgagaaaacagattatttactcaatatttttaagcctaaattagaacaatacgagagggctattaatgatgctaatagtactcatattaaacctgatagtattgactttagaaaaatctttttacaacttttgaaactaactaaggaatttttacagcctttattggatagatcaattatttttgagttttcaaagaagaaagtttctcaacaaattgaaaagatttctgagtttgctggagaaaaaaataatacaaaaatttataatgtattgaaaaatggagaagaacttagacaatattttgaagcaaatggatcccaagttccatatggaagagtaagtctaaactattatacagcagtacaaaaaccaaataattttgatcaagaaattaaaaaagctatagacgatttaggaataataaattttttgaagaaaagtgatagtcaaattatcgattatcttcatcaaggatcaaaacagaaaataaaattattacttacttcaaaatctccttattctattgagttattacagttatttaaagtaaagcctattcctttttcagtaaagtataatttggcaaagttcattgagaaaaattataagaatgaaattaatttatcttatgaagagattttggataaattgaatttgttaggaagagctattgatatcgcaaatgattttaaaaattccaataatcaaaataacttttctcttgatgaataccctgtcaagttagcctttgattatgcttgggaaaatacagcaagaagtttaaaaagaactatacctttcccaaaagaggtatgtaaacaatttttaaaagataattttgatgttgatgttaatgtcgataatgcagattttaaattatatgccaatcttttattcatagcagataatctagcaactattgaatataataatccaaataatgaagcagaacttataaatgagataaaacaagtatttgactctatagacttttcttttgataaagaaagatatggaggatataaaaatgatgttttagtattgctaaataaggcaaaacctcaaagagactattccactatattaaaagcaaaacaagaattgggattattgagaggaggactgaaaaataagataaaaaaatacagagatttaacacagagattaatagacaaaaaggattcacattttggaatcgcaagttttgtaggaaaaacacttgctaaaataagagatcgactcaaggaagaaaatgaacttaataaaatttctcattacggagtaattcttgaagataaaaatcaagataaataccttcttatatcacaacttgatggaaaagatacaagagaaaaaatatctcaaaaatttggcaatggagatataaaggtgtatcaagtaaattcttttacttcaaaagcattaaataaatttatcaaaaatcctttgtcagaagatgcgaaaaaatttcacggagattttagatataaacataaagaagtttcaatatatgatgaaaaaggaaaatggacaggatatcaggaaagttttttaagtcatataaaaaagtgtttaattgactctgagatttcaagagaacaaaattgggaagcctttggttggaattttgctggttgtaatacttatgaagagatagaaaaagaagttgattctaaaggatatcagttgactgaaaactttatttcaatagggaatttagaaagcttggaaaaagatgaaggttgcttgttatttcctattattaatcaagatatttcaagtcaaaaacaagaaaataaaaacatttttactttagaccttgaaaaggtatttgagggaaaagaatgtaggattcatccagaattttctatcttttatagaaagcccatggaagaacacaagaaggagaataaatcaggaatcataaatcgttttggaaggttacaactattagcaaatcttggtatagaatttattccaagaaactcttcttttaaaacaaaaaaagaacaaaatagaattgcgattgatcaaaagaaacaaaatcagttagtgcaagagtttaaccaagaaaaagtaaatacatattttgaaggattagataattattatatttttgggatagatagaggaatcaaacaactagcaactttgtgtatcacaaataaaaatggagttatacaagattttgatatttatacaaagcactttaatagtgaaagtaaaaaatgggaatacaaatttcatagaaaagatggaatattagatttaactaaccttaagattgagtctgataaaagtggaaataaatatatagtagatatatctttatttcaagctaaagatgaagatggaaatcctaccggcacaaataaacaaaatatccaacttaagaaacttgcatatatcagaaaattacaatatcaaatgtctgcaaatgaagaaggagttttaagttttttggaaaaatataagaacaaagaggaaagagaacaaaatatgaaagaactaattactccatataaagaaggaaaaaattttgtagatttaccaatggatatttttcaagaaatgtttgaaaattattatagattaaaaactgatcaaaatttgtctgaatctgagaagaaaaatcttatgaagatcactacagagcttgatgcaagtgaaagcttgaaaaaaggagtagtcgcaaatatgataggagtgatttattatttgatgaaaaaatatgaatataaagtgaagatttctcttgaagatctttcaaatgcttggtttttttcaaaagatggactttctggagatgttgtgctaaatacgaaaaatgatggaacaatggatttaaagaaacaagataatctagcgcttgctggagtgggaacatatcatttctttgagatgcaattgttgaagaagttatttaaaatttctaccgaagaaggaattttgcatttagtcccaagttttggaagtgtaaaaaattacacagaaatttttaaggataaggggaaatatgtatataaacagtttggtattgtttatttcgttgatccaagaaatacaagtaaaaaatgtcctgtttgtttaaatacacaaacgactggaaaaaaagaaggaattccaattataaatagaaattacaaaaaatctaatatattttattgtgaaagatgtggatttcaatcaatacacagtcattgccaagaagaaaatattaaagatagtaatggttttcattattctgtagaagaagtagagagaatagagatgaaaaataaagaagcaatagaaaaatataaaaaacaaggaaaaaatcttcattttataaaaaatggagatgataatggtgcatataatattggagagaaaataagagaacttccaaaaaaatcagatgtaaagaatacctag

SEQ ID NO: 311 - DNA, 3921 bp, Unknown
  metagenome-derived sequence
  misc_feature (1)..(3921): Unk102 with TGA>GGA
atgattaatctagaaagttttaaaaacttgtatgaagtgaggaaaacagtcagatttggattaaatcaacctagaaagaaaagtgatattaataaaacgcatggactattaaaagatttggttgagatttcttttgagagagaaaaaaaactaattaataatgaaaataatcacgtactaattgatacagagaaagttcttatagagaaattacagcaatatgtaaatggactagaaatacaactaaaaaactggaaaggaacatatcaaagatatgatttaatagctataaataaagactactataaaatattggcaagaaaagcaaaatttgatgctatgtgggagattactaaatttgataaaaaatcaaataaatatataaaagttaaacaaccccaagcaagtcaaatttctttatcatcattaaagattggaaatagaagtgatagtattattcaatattggggagagataattgagaaaacagattatttactcaatatttttaagcctaaattagaacaatacgagagggctattaatgatgctaatagtactcatattaaacctgatagtattgactttagaaaaatctttttacaacttttgaaactaactaaggaatttttacagcctttattggatagatcaattatttttgagttttcaaagaagaaagtttctcaagaaattgaaaagatttctgagtttgctggagaaaaaaataatacaaaaatttataatgtattgaaaaatggagaagaacttagacaatattttgaagcaaatggatcccaagttccatatggaagagtaagtctaaactattatacagcagtacaaaaaccaaataattttgatcaagaaattaaaaaagctataaacgatttaggaataataaattttttgaagaaaagtgatagtcaaattatcgattatcttcatcaaggatcaaaacagaaaataaaattattacttacttcaaaatctccttatcctattgagttattacagttatttaaagtaaagcctattcctttttcagtaaagtataatttggcaaagttcattgagaaaaattataagaatgaaattaatttatcttatgaagagattttggataaattgaatttgttaggaagagctattgatatcgcaaatgattttaaaaattccaataatcaaaataacttttctcttgatgaataccctctcaagttagcctttgattatgcttgggaaaatacagcaagaagtttaaaaagaactatacctttcccaaaagaggtatgtaaacaatttttaaaagataattttgatgttgatgttaatgtcgataatgcagattttaaattatataccaatcttttattcatagctgataatctagcaactattgaatataataatccaaataatgaagcagaacttataaatgagataaaacaagcatttgactctatagacttttcttttgataaagaaagatatggaggatataaaaatgatgttttagtattgctaaataaggcaaaatctcaaagagactattccactatattaaaagcaaaacaagaattgggattattgagaggaggactgaaaaataagataaaaaaatacagagatttaacacagagattaatagacaaaaaggattcacattttggaatcgcgagttttgtaggaaaaacacttgctaaaataagagatcgactcaaggaagaaaatgaactcaataaaatttctcattacggagtaattcttgaagataaaaatcaagataaataccttcttatatcacaacttgatggaaaagatacaagagaaaaaatatctcaaaaatttggcaatggagatataaaggtgtatcaagtaaattcttttacttcaaaagcattaaataaatttatcaaaaatcctttgtcagaagatgcgaaaaaatttcacggagattttagatataaacataaagaagtttcaatatatgatgaaaaaggaaaatggacaggatatcaggaaagttttttaagtcatataaaaaagtgtttaattgactctgagatttcaagagaacaaaattgggaagcctttggttggaattttgctggttgtaatacttatgaagagatagaaaaagaagttaattctaaaggatatcagttgactgaaaactttatttcaatagggaatttagaaagcttggtaaaagatgaaggttgcttgttatttcctattattaatcaagatatttcaagtcaaaaacaagaaaataaaaacatttttactttggaccttgaaaaggtatttgagggaaaagaatgtaggattcatccagaattttctatcttttatagaaagcccatggaagaacacaagaaggagaataaatcaggaatcataaatcgttttggaaggttacaactattagcaaatcttggtatagaatttattccaagaaactcttcttttaaaacaaaaaaagaacaaaatagaattgcgattgatcaaaagaaacaaaatcagttagtgcaagagtttaaccaagaaaaagtaaatacatattttgaaggattagataattattatatttttgggatagatagaggaatcaaacaactagcaactttgtgtatcacaaataaaaatggagttatacaagattttgatatttatacaaagcactttaatagtgaaagtaaaaaatgggaatacaaatttcatagaaaagatggaatattagatttaactaaccttaagattgagtctgataaaagtggaaataaatatatagtagatatatctttatttcaagctaaagatgaagatggaaatcctaccggcacaaataaacaaaatatccaacttaagcaacttgcatatatcagaaaattacaatatcaaatgtctgcaaatgaagaaggagttttaagttttttggaaaaatataagaacaaagaggaaagagaacaaaatatgaaagaactaattactccatataaagaaggaaaaaattttgcagatttaccaatggatatttttcaagaaatgtttgaaaattattatagattaaaaactgatcaaaatttgtctgaatctgagaagaaaaatcttatgaagatcactacagagcttgatgcaagtgaaagcttgaaaaaaggagtagtcgcaaatatgataggagtgatttattatttgatgaaaaaatatgaatataaagtgaagatttctcttgaagatctttcaaatgcttggtttttttcaaaagacggactttctggagatgttgtgctaaatacgaaaaatgatgaaacaatggatttaaagaaacaagataatttagcgcttgctggagtgggaacatatcatttctttgagatgcaattgttgaagaagttatttaaaatttctaccgaagaaggaattttgcatttagtcccaagttttggaagtgtaaaaaattacacagagatttttaaggataaggggaaatatgtatataaacagtttggtattgtttatttcgttgatccaagaaatacaagtaaaaaatgtcctgtttgtttaaatacacaaacgactggaaaaaaagaaggaattccaattataaatagaaattacaaaaaatctaatatattttattgtgaaagatgtggatttcaatcaatacacagtcattgccaagaagaaaatattaaagatagtaatggttttcattattctgtagaagaagtagagagaatagagatgaaaaataaagaagcaatagaaaaatataaaaaacaaggaaaaaatcttcattttataaaaaatggagatgataatggagcatataatattggagagaagataagagaacttccaaaaaaatcagatgtaaagaatacctcgatttcaggaaatatttctttttcatag

SEQ ID NO: 312 - DNA, 3921 bp, Unknown
  metagenome-derived sequence
  misc_feature (1)..(3921): Unk103 with TGA>GGA
atgatcatggtaaatctagaaaattttaaaaatttgtatgaagtgaggaagaccgtcagatttggattaaatcaacctagtaagaaaagtgatattaataaaacgcatggactattaaaagatttggttgagatttcttttgagagagaaaaaaaactaattaataatgaaaacaatcaagtactgattgatacagagaaagttcttatagagaaattacagcaatatgtaaatggactagaaatacaactaaaaaactggaaaggaacatatcaaagatatgatttaatagctataaataaagactattataaaatattggcaagaaaagcaaaatttgatgctatgtgggaaattactaaatttgataaaaaatcaaataaatacataaaagttaaacaaccccaagcaagtcaaatttctttatcatcattaaagattggaaatagaagtgatagtattattcaatattggggagagataattgagaaaacagattatttactcaatatttttaaacctaaattagaacaatacaagagggctattaatgatgctaatagtacccatattaaacctgatagtattgactttagaaaaacctttttacaacttttgaaactaactaaggaatttttacaacctttattggatagatcaattattttcgagctttcaaagaagaaagtttctgaagaaattgaaaagatttctgagtttgctggagaaaaaaataatataaaaatttatgatgtactaaaaaatggagaagaacttagacaatattttgaagcaaatggatcccaagttccatatggaagagtaagcttaaattaccatacagcagtacaaaaaccaaataattttgaacaagaaattaaaaaagctatagaggatttaggaatagttgagttcttgaataaaagtgaacaggaaattacaagctatttacatcaagattcaaaacaaaaaatacaattattacttacttcaaaatctccttatcctattgagttattacagttatttaaagtaaagcctattcctttttcagtaaagtataatttggcaaagttcattgagaaaaattataagaatgaaatcaatttatcttatgaagagattttagataaattgaatttgttaggaagagctattgatgtcgcaaatgattttaaaaattctaataataaaggtaatttttctcttgatgaatatcctgtaaaattagcctttgattatgcttgggaaaatacagcaagaagtttaaaaagaactatacctttcccaaaagaaatatgtgaagagtttttaaaagataattttgatatagatattcataatgcagattttaaattatatgccaatcttttattcatagcggataatctagcaactattgaatacaataatccaaataatgaagcagaacttataaatgagataaaacaagcatttgactctatagacttttcttttgataaagaaagatatggaggatataaaaatgatgttttagtattgctaaataaggcaaaatctcaaagagactattccactatattaaaagcaaaacaagaattgggattattgagaggaggactgaaaaataagattaaaaaatacagaaatttaacacagagattaatagacaaaaagaattcacattttggaatcgcgagttttgtgggaaaaacacttgctaaaataagagatcgactcaaggaagaaaatgaactcaataaaatttctcattacggagtaattcttgaagataaaagtcaagataaataccttcttatatcacaatttgatggaaaagacaaaagagataagattgttcaaaagcttggaataggagatataaaggtgtatcaagtaaattcttttacttcaaaagcattaaataaatttatcaaaaattctggatcggaagacgcaaaaaaatttcacggagattttagatataaacataaagaagtttcaatatatgatgaaaaaggaaaatggacaggatatcaggaaagttttttaaatcatataaaaaagtgtttaattgactctgagatttcaagagaacaaaattggaaagcctttggttgggatttttcttgttgtaatacttatgaagagatagaaaaagaaattgattctaaaggatatcagttgactgaaaactctattttaaaagagaatttagaaaaattggtgaaagatgaaggttgttcgttgttccctattattaatcaagatatttcaagtcaaaaacaagaaaataaaaacatttttactttagattttgaaaaggtatttgagggaaaagaatataggattcatccagaatttcctatcttttacagaaagccaatggaggaacacaagaaggagaataaattgggaattataaatcgttttggaaggttacaactattagcaaatcttggtatagaatttattccaagaaactcttcttttaaaacaaaaaaagaacaaaatagaattgcgattgatcaaaagaaacaaaatcagttagtgcaagagtttaaccaagaaaaagtaaatacatattttgaaggattagataattattatatttttgggatagatagaggaatcaaacaactagcaactttgtgtatcacaaataaaaatggagttatacaagattttgatatttatacaaagcactttaatagtgaaagtaaaaaatgggaatacaaatttcatagaaaagatggaatattagatttaactaaccttaagattgagtctgataaaagtggaaataaatatatagtagatatatctttatttcaagctaaagatgaagatggaaatcctaccggcacaaataaacaaaatatccaacttaagcaacttgcatatatcagaaaattacaatatcaaatgtctgcaaatgaagaaggagttttaagttttttggaaaaatataagaacaaagaggaaagagaacaaaatatgaaagaactaattactccatataaagaaggaaaaaattttgcagatttaccaatggatatttttcaagaaatgtttgaaaattattatagattaaaaactgatcaaaatttgtctgaatctgagaagaaaaatcttatgaagatcactacagagcttgatgcaagtgaaagcttgaaaaaaggagtagtcgcaaatatgataggagtgatttattatttgatgaaaaaatatgaatataaagtgaagatttctcttgaagatctttcaaatgcttggtttttttcaaaagacggactttctcgagatgttgtgctaaatacgaaaaatgatgaaacaatggatttaaagaaacaagataatttagcgcttgctggagtgggaacatatcatttctttgagatgcaattgttgaagaagttatttaaaatttctaccgaagaaggaattttgcatttagtcccaagttttggaagtgtaaaaaattacacagagatttttaaggataaggggaaatatgtatataaacagtttggtattgtttatttcgttgatccaagaaatacaagtaaaaaatgtcctgtttgtttaaatacacaaacgactggaaaaaaagaaggaattccaattataaatagaaattacaaaaaatctaatatattttattgtgaaagatgtggatttcaatcaatacacagtcattgccaagaagaaaatattaaagatagtaatggttttcattattctgtagaagaagtagagagaatagagatgaaaaataaagaagcaatagaaaaatataaaaaacaaggaaaaaatcttcattttataaaaaatggagatgataatggagcatataatattggagagaagataagagaacttccaaaaaaatcagatgtaaagaatacctcgatttcaggaaatatttctttttcatag

SEQ ID NO: 313 - DNA, 3747 bp, Unknown
  metagenome-derived sequence
  misc_feature (1)..(3747): Unk105 with TGA>GGA
atgaaagagtttcagaatttgtatgaagtgaggaaaacggtgaggtttattgcaaaacctactaaaaattcaaaatctattatagactttttgaaaataggaaataaatcagataataatgagaaatataagcttctcggagaatttctaaataattttaataaaattatagatggaagtaaaaaattatttttttatgaaaattccggaaatttaaaaaatttttttaagataaaatataagtttctacaaagtcatacaaaatatgatttttatgacaggaaaaaccttaataaaagtaatgaaaagatttatagtttcaaagatattgattttattgaaaattttttaataacctatttcgaaaatttagatgaaattcataagaacctaaaactttaccaatctgcacaaaaagaaaaacaaagtaggtatagagaaattggattttatttacaaaaattacatggaaaaaatacattgattttaaaggatctgtttgaattcttagcaaaaacaaataagtctggaattgataataaaattgaagaaataaaaaacttattaccaaattttgaaaataaattaatcaatattttaaaagaatttggaccaaataatggaatagaaatagccaaaggatgctttaactattacgtcttaaataaatcatcaagagagtattttaatggagaaatagaaaaactaaaaaaacaacaaaaaggaagtttacctaaatatatttttaattttaagtataaagatgagaataaaaaagatatttttgtaaatttagatgaaatattttttaaaaatataggactttctaaaaaagaaattgaggaaatgaatttgaaagaagcttatgattttataaaagattttaaagccaaaagaaaatcggcttttaatcaatttgttggaaatttatatacttatgaaaatttattagaaaataaaaagagtaagtataaatataaagaaaatggaaaattaaaagaagaagaaatgtctgttgagttattttgtgatattggagaagaaaattttacagaatttaaaagattaacaaataaaataaaagaaaaaggaagtaaaaagaatgatattttacaaggattaggaggattaaaaaaagatgaacttgaaaaaataattaaaaataaagagaaaaatggagaatatttagaagaaagtgaaaataattttaaaatcttatctttagaaatagaagatttagcaaaggaaagaggaaaattttttaatataccaaatgaaaaaatctatactaaaaattataaagaattatgtgaattttataaaaatatcgcccttaggttaggacagaataaagcaagaattcttggatatgaaaaacaaatcgttgatagtgaaaaacttattttttttgctacaataattgaaaggggagataataagtttttagctttaattccaaaaggaaaagaaagacttcatcaaaaggcacatgattttctagataaaggagagaataataataatgatggaactataaaaatccattatttcaaatctttaactttaagagccttacaaaaactttgctttaaagaagataaaacagttcttgttggaatagaagataaaaatacctttattagaggcattgaaaaagaactttcattaaatcctgaaactcaaaataaaaaatatttctttaaaggaaaattaaaaagatttgatgaattcaaaatttataatagatttttgaagaaagaagagtgggaaatagataaacaacttttgatagaattttatcaagatgttttacaaactaaatcagcaaaaaaagttttagatataaaagactttggattagataatgtcttaaatgaaacttttgaaagtctcgatgattttgaaatagaatttgaaaaaattgcttatataaagaagactttaaaaattgatgaaattggatatcaaaaatttattgaagattttggagtatttttgtataaaataaattctcaagacttatctataaataacatagaacacaaaaataaaaaacatactgattattggcttaatttttgggataattttaaaaataagaattatgatataaagataaatccagaatttagtttatattatactttagcggataaagatttaaaagaaaaaaaagaacaaggattattaaaagaacctataaaactatctggactaagaaatagaaaaacaaagcctcaacttatatttactacaaattttagcttaaactcaaatgaaaaatcagaaaatttagcctttttagaaacttccgatttaaaagaaaacatagaaaaattcaataataaactagaagaagatattaatcaaagatattcccaaaatgatttgtggtattttggaattgatagaggaataaatgaacttgcaaccttaagtgttacaaaatttctaaatacaaagaattttgaatttgcaaaaattaaatgtttaaagttaaaagatgaatatgataagataattgatataaaaacagatgaaaaaggaattactaaatatatatttgaaaaatcagactatattacgtattacgacaaagatgaaccacacaaaagatcttttgagatttcaaaaaatatttcatattttttgaataaatcagatttttttgagactataacaactggaataattgatttaacacaggctaaacttattggagataaaattatactaaatggagctaaatcaactcttttaaaattaaaagaactttcagcaaaaagaagaatatttgaaaaatataatgaaatagataaaaatcttgatataacttcgggaaaaggaaatagtggaatttttataaaattaaataatggaaaatatattcaggtatattggttcaatgaagatttaatcataacatctcaagaaaaaaaagagataagaaaatatagagaaaatttacatttaaagattatagaaatatttaaaacttattttaaggagatagaaaaaaataataattttgaagatttagaaactatctcaaaaataaatcatttaagggatgctattacttcaaatatgattggaattatatatttcctaatgacgaaaaaaaacggatatttcggaaaaatagttttagaaaatttagatgacaccataggatttactggaatagaaaaaactaaaacaaaaaaaggaaaatttgatggaggaaaagagtatacaggagaagaaataaaaatgatcgatgggcatttctatcaatcaaatacagatatttcaagaagacttgagtggtctttgtacagaaaatttcaaggtattggatatgagggaattggactagtacctccagaaataaaacaatcagtatttttaaaagatgatttcggagtttataaatttggaattatagaatttataaaaactggtggaactagttctacttgtccttattgtgagataaaaagtaaagataaaccaggattaaaacaacatcacgaaaaagataattgtggattcaaaaaacaagttggagaatatttagagttttataataaggataattctataaattatgatagtattgcggcatttacagttggaaaatttagttttgaaggaaaaactccaaagtttgaaaaaacaaaaaaagttgtcgaatattctaaagtaaaaagagaagaaaatgtagtatttaaaagatcaaaaaatttatcatataataaaaaataa

SEQ ID NO: 314 - DNA, 3105 bp, Unknown
  metagenome-derived sequence
  misc_feature (1)..(3105): Unk110 with TGA>GGA
atgcaccattcattacaaaataatttaaatttttttgaagtacataaaaatattagatttttattagaacctctttttgatgaaaaagatatgatagaaaacaaaaatggaataaaaaataatactcaaatatttcttcaaaaatatgaatttattatcaagcaactcaattttatactattaaattcaagaaaaagaacattaaatgcaaaactaaaaatcaagttttgcttccttaaaaaacatactaaaactctatattttgaatacggtattgatactttaaaaaataaacataaaaaccaaatagaaatgaataaaaaagaacttgaatatttggtaaacatatttgaaaatttttttcataaaaatcttgactatatagaaaaattaaaaatattgttacatacgccaaatgctcaaaataaagatattcaatattattttcaccaaatattgagaagaggaaattttaattttatacaagatttatcagaaagtattaatactgaaattccaaatacatatggaaaaattatcgaaataaaagaaaccctagaaaacttagaatacataaaaaaatctctccaagatgaattatatcaacaacaatgttttgggaatactatagaagtcgtaaatttaaactattttcttgttaataaaaaatcaaaaaattatacagaactcatcacaaataaaaaaaatactctccaacatcatatatttgcttttccaaaatttttagcagcgacgaataataatggattaaaagattttgaaacatattacaatattaactattctgaaggaaaattagtagaaacttatgagctactcaaagagtataaaagtagtcaaaaagaaggatttttacaatttatcagttctggttatacatataatgatttaatacatcataaaaattttttatttaaaagtagacattttgataccaaagaatttatgctaagtatttatctgtttgatgatatatcaatgagagattttaacataattcaagatctatcattaaaaattatgtttcttatcgatttagaaaattatccagaaaaaattacttctagtaaagaaaaatataaagaattgtttggagaagatattttgactgataaagcatatatagaggatacaaaaggaaaaattatgaagaaattagtctctataaaaagacaaagaggaatgttatttaatacagaaagtagatattgtgtttttaggaaatacatcaatttttgtgctgaatataaaaaaattaccttagaaattggaaaaataaaatctcatattaaagccttaaaaaccgagcaaaagcaaattgataaaaccaatagttggggacttattttagaaaaaaattcacaaaaatttttacttacaatccccagagaacaacaaaatgttccatattttgataaaagcaataatatacttcaagcaagacattttatcaaatctctttcatatcaaaatgatgattctacgcttttttattttgaagcgctgaatttacaaatactcgatacactttgtttttcaaaagaaaatacaaattttagaaataaaattgcaaaagaactctatggtataaattctcattttgtcgaaaaaaaagaattcacaaaactaaataaaactattgaagtttataatatcaaaatgaaatatgaacttcctaaaaatatttatggcgaaacttcaaaaagtactctcctccagttttatcaatcaattattaaactcaattctttgaaagaacacctcattatcgaaaatcctattgaatttgaaaattttaccaaaaaagattttacttcattagatgagtttgaaaaaaaattaaaagaaatttgttatgtaaaaaagatttttaatatttctgaagataatttagattttttaataaaaaaatttgatggacgtctgtataaaattacaagttatgacttagaaaaaaaccttaaaagagaaaatataaaaccacatacaaaaatttggttagatttttggaatgaaaaaaatcaaatcaacaaatatcctattcgtatcaaaccagaattaaaaattagttttatcaaaaaagatgattctttgagtgaaaaaaattcagatataaaaagaaatagaaaactagaaaatagatttttacttaccacaaatatcacagaacatgcttgtaaacatcatggaattataagcgaaaatactaccaaacaaataatagatttttatgaaaattttaatcaaatatttgaaaaacatccttctacagaaatattaggatataattactttatagatgtttatgaaaataattcaatacatctctccatatatgaaaatcaaaatactacctatattcctattgagagttatgaattaaaagaagattttttttcaatgaccaatgaaaaaggaacaaaaatttataaaaatatttcctactttcaatatgatgaacatcaaaatttatattccaaacaagaaaaccaatatattgatttgcaaacagccaaactgataaatgggaaaatatattcaaacggagatatttctacatatttaaatcttaaaatgatatcagcaaaaaataaaatatctcatttttctcatgaatattctcatattaaaatttctcaggaaaatcctgaaaacatagtattatacggaggagataaacaagaagtagttatctataattttgataaaaaatatgactccatactttctcaatcttgtattatacacgaattagaagatttcttggaaagaaaaaatattgagggatatttttctgaagatatatcaatacaaagtataaataatctaaaaaatgctctttgtggaaatatggtaggagttatattttttctccaaaaaaattatcctggaaaaattattatcagaaattttacgcataaaaactactctcgttcgctctatagtttaggaaaaaattttgaagaaaaaatattacaaaaactttcatcactcagtcttattccttcaaattacaaacatatatttacattgaaagaaaataataccttaaataaactaggaatcatagagtttgtaaattaa

SEQ ID NO: 315 - DNA, 3531 bp, Unknown
  metagenome-derived sequence
  misc_feature (1)..(3531): Unk111 with TGA>GGA
atgtcgtatattatgaatgaaaaagaaatgcaaaacttgtatgaggtgaggaagacggtgaggtttgagttagtgcctcagtttattggaactaataaaaaaccagctggaaatactgaaaatagagtaaaatttatttttgaaaatttgataaaattaacagatttacactcagaatttgttaatttacttggaaaaactcttgttaatgaaagagaaaaaatcataaaagaagaagaaaatgacaataatcaaagtaaattattttcaaaagaattattggaaaaatttggtctttctaaaaaagagagcttaacttcagaaaatagtaaaattataaattacttttatgattacgaaattggaagcttagttcaattcaaatataaaggactagaacaagtttttaaaaatgattggattgaaaataaaaagaaaattaagtatacaatagataaatatggaaacgaaaaaaagaaaaataaaaactatatcacacttacagacttaggagaaaataattttataaaaaagtattttgaagaatggtttgaaaacaataaaaaaataaatactgaactaaataaatttaaattcatagaaaacgatttgtcaagaatttctgatattggagctgaaatacaaagattaaatggaagaaattatttaggaaaactttatactttatttgagggaggatatttagttcataaaaatgatgtaaatattataaataatttaaaggaaaaattagctgaaataaaaaagttgataaaaactttactggaacttacaaaaccaagtcaatcttttggatttccaatagaacatatttcactgaattattatacaagaaacaaaacaccaaaacaatatgaagaagaaataaaagcaaaagaaactttattaaaacaaccttatttgggaaaattgggaaatctttatggaattaataaaaatagctcaatagaagaattgtataaagaaatgaaaaaaattaaagcaagagaaaaaagtgcttttatgcaattattacaaaaagaaataccatatgaaaatattcaaaatccttttgtatataaagattttgagggaaatgaacatgatgattataagattcaactttttagcaatataaaagaaggagaagattggaaaacaaaagaaaaattaacatctaaagatatatataataaagttctgaatctaacaaaacaaatagaaaaagaaactaataaacaagaaaaaactaaattaaaagaaaaaagaggagaacactattttatgggaaataaagtttttcctgattattttagtttttgtgaagactataaaaaggttgctagggaatatggagaaagaaaagcagaagttttgacacttgaaagagaaaaaatattagcagaaagagaaagaggatggggatttataacaaaaaatgaaagtggagaatatttcgtaaatacgatttcaatagaaaatactcagaaagtttataaatacttgaaagatggaaatatgttggaaaaaattggagatacaagttattttatatttaactcaatcactttaagagctttagataaactttgttttaaaaaagattcatcgtttgcaaaagatataaaaataaaaattgacaaaaaatttcttaatgagtttaaaagtcatgacggaaaaataatagaagaaataaaatcaaaaaatcaactgatagaagaaaatgagcttttaaacttttataacgaagttttcgaagttcaaactactttaggaattatgtatagagatggggaaacatctcaaaatattttaaaaaattcacaagatgaagaagaatttgagataaatctaaaacttgaatgttatgttttagatgaatttaaaacaaatcaagaaaaaattgataatttactaaaaaataataatggaaactcttataaaataacttcttgggatttaaggggaaaaagagaaaaacctgaagaacacacaaaatggtggtttaagttttgggattctaaaaatgaagaaaataaatttcctttaagaataaatccagagattagcatttcttatgtagaacaagataaaaattttaaaaaattaaaaccaaatcaaacaaataatagaagaacaagagaaagatttttacttgtaacaactttatctcataaagcgaattcaaagtatattgatagtgcttttacattagataaaaaacaagaaaatattgatatagttaataatagtttgaaaaaatatgattatttttatggactggataaaggaaccaatgaacttataactttaggaatttataaaaaaggagaaaacggaaaaatagaaccagtaaatatttctgaaaaaatagaagtttataaaatcaccgataatggattaaataaaacaaaagatgtaataaataaaggtggaagtataaaaactcatattttatataaaaatccttcaaactttttagagtttataaatgataattctatttttgaaaaacaagaacaagaaaaaaatattatttcttgtcttggaaatctgacaagtgcaaaagttattgataaaaaaattattttaaatggagatgtaaatactataaaaaaactttatgaaataaatgcaaaaagatttatttatatatttattcaagaacaaggaaaatctgatgaaaaaattatttttgatgataaagatcaagtttttagatttggtggaaaaggaatttattattataatgaaaatgtaaaaaattttatttcgaaagaagaaatagaaaaaaaattaaatgactatattttacaaataaaaaattttgatccaaaaaaagacgaattagaagatatttctataaataaaataaatcatttaaaaaatgccgtttgtgcaaatatagttggagttataatgagattacaagaaatagatttatttcctggatatattgtttatgaaaatttaaaaatttctactagtaatagtgatttagaaaaacaaaacacttttctaggaaatcttataaatgaaaaaatttataataaattacaattaacaaacgaagttccagcaattttaaaacagtttagaagtgatttagatgaaaaagatataattcaacatggaaagattatttatataaataaaaactttacttctacagcttgtccggtttgtaatgaaactctgacaaaaactgaaaatggaaaagtggttgataaaaaagataatgaaataaataaattaggaggacatatgtcagactttgaaaaaaaaatgacacacttaacagataaagaatatcaagattggctaaaaaatgaaagtttcaaaaaagctaatatgagtaagggaaaaatagataaaaataaatatcaatctggaaatataagaggaaaaacttgtgagtttcatttacaaaattcaaaatatctagaatttaactttctaacttctggagacgacctagcaacttacaatatagcaaaaaaaggacttgaatacattaaatctttaaattaa

SEQ ID NO: 316 - DNA, 3522 bp, Unknown
  metagenome-derived sequence
  misc_feature (1)..(3522): Unk112 with TGA>GGA
atgggagagtttaggaatgtttttgaagttagaaagaatgtgaggtttgagttggaatctaatatcttattcagagatttgaaaataaattctaattgtgatgatgaaaatttattgaagagttttaatgaatcatataaaagttttatagaattacttttacaaaatttttgtaaaagaaaaaatattgttacagaaaaaaaagaagtaggaaataatatttttgcaaatgcttttaaaaaggctggaataaatgtagaggaaaatagtaaagaaaataaaaataatgaagaaaaatatgaatatgaatggtttaaaacgattcaatttttacataagggacttgaagaattatttataaatgattttatagaaaatagaaaagaaattaaatatgatagaaatgggaaaaagaaacaacataattatataacctttggagatttaggagataaaaattttattaagattttttttgaaaacttttttaaagaaatagatgtaaatttaaaagaattaaagtattttgtaactactggattagagaataaatcaagaacatcagatatattatttttagttcaaaagataaattcaagagaacatttaggaaaactttatactatgtttgaaaaaaattatattcaacataagaatgattcatctgttattgaaagattaaagatttctattttaaatttaaaagaaaatatagaaaaacttttaatcgaattaagaacatcacaatcttttggaattcctatagaacatgttagtttgaattataattcaattaataaaacagaaaaagaaattacaaaagatattaaagaagtattaaaaggaaataatttaaataaaaaatataaatggacttttgaaaaaaaagataatttggagaaaaatgaaaaaagtataattaaaacttttaatttaaaagaaaaagattctttgaaattaatacaagatgaattaaatattgaaattgatataagtgaatttaaagaaaaagtaaaactttttaaagctaagcaaaaagcaggatttttacaattattacaaaataaagtaccttttgaagattttaaaaattcttttaattttgaatttatgggagaaaattttaatgattttagaattactcttttttctgatatatcaaaagaaaattatgatgaaatgttaaaattaacaaaaaaaatagaacaagaaagtgataaagaaaatagaaaaaaattaaaaatgcaaagaggaaaattttttcaatttagattaaaaaaatttaaagacttttctgaaaattataaaaaaattgctcaaaaatatggaagagatagtacagaaataaaatccttagaaagacaaaaaatagatgctataaaattgagaggatggggatttttatcaaaagaagataataattattttataaatacttttgatgttgataattcaaaacaagtttataaggaaattaaaaatcttcaaaaagatggaaatgatataaaaatttatactttatcttctataactttaagagctttagataaattgtgttttaaaaaagattcaagttttataaaacatattaatacaagagattttaatgaaagagtttcacttgataatggaaaaagtttttggagattaaaaaataaaactactcttttagaagaaggaagacttatgaatttttatatctatattttagagaatcaagttactttaaatataaaatataaaagtaaaaattctttgaatatattaaaaaattcaaaagatattgaggaatttgagattaatttaaaattagaaacttatgaacttatagaaaaaaatatttcaaaacaaacttataaaaatattttaaataattataaaggaaattcttataaaataacttcatacgatttagaaaagggactagaaacaaaaaaatatacaacttggtggtttaatttttggaaaaaagaaaataaaaatgataaatatataattagaataaatcctgaattaacaatctttttcaaagaaaaaaataaagattttataaaagaaaattctgatattaagaaaaataggagattagaagatagatttatattatcaacaaacttttcttttcattcaaataaatcttatatagattcagcttttataaatgatgaaaaaagaaaaaatagtatagaaacttttaatgaaatatttaatggaaaaaataaattagattatttttatggattggataaaggaacaaatgaattgataactttatcaatttttagaaaaaatggagaaaagattgaagttgtaaatataagtgagaaaataccagtatatagaattacaaataaaggattaaatcattttgagtatataaaagataaaaaaactggagaatgtattttagatgaaaaaactggagaaaagaaaaaaagatttttatcaaaaaatgtttcatattttataaaagatttacaaaataaagaattatttgaaaagttggagataaaatcctgtttaggagatttgacatatgcaaagcttattaaaggaaatattattttaaatgctgatatatttacaactttaaatttatataaagtaactgcgaaaagatttttaaatgatgcaattacaaaaggaaatatagaatcagatagaattttatataatgaaagtgataaaatttattattatgaatatttaaatagaggaaataaatatacaaaagtaattttgtattggaaagatgaatttgattttttaccttataaagaagaaaaatttaatagtttaaaagaagaagtagaggatgaattaaatcaatatataaaagatataaaattatttttacaaaactcaaaaaaatataataataatgaaaatatatcaattcaaaaaataaataattataaaaatgctatttcagcaaatattgttggaattattatgaaattacaagaatattttaatggatatatttgttatgaaagtcttgatgaaggacaaattttaaaaaagggattaagtacttttataggaaatgtagtaaatgaaaagatttacaatagattagaattaaatttagaagttcctccaattttaaagaaatttagaactgatattggaggaaagcagataattcagcatgggaaagttatttatgtggatgaaaataatacatcaaaggcttgtcctagatgtaatgagtatttattaaaaaaagataagaatggaaatttaatagaaaaaaaaggtgatggagaaattaataagttaggaggacatttaatgggagaaatatgggaatataatatgcatcattgtgataatcctaaaaattgtcctaatattgaaaatcatatatcaaaagaaaataaagcaaaatgtgattatcatatgaaaaataataattatggatttgattttattaaatctggagatgatctagcagcatataatattgctaaaaaaggattagaatatataaactttataaattcaaatactacttcttag

SEQ ID NO: 317 - DNA, 3360 bp, Gracilibacteria sp.; identical to SEQ ID NO: 307
  misc_feature (1)..(3360): GbCms1 with TGA>GGA

SEQ ID NO: 318 - DNA, 5543 bp, Escherichia coli
  misc_feature (1)..(5543): 133908 plasmid
  misc_feature (216)..(564): ileS3 gene
  misc_feature (412)..(435): gRNA target sequence
  misc_feature (2015)..(2317): ccdB gene
atccggatatagttcctcctttcagcaaaaaacccctcaagacccgtttagaggccccaaggggttatgctagttattgctcagcggtggcagcagccaactcagcttcctttcgggctttgttagcagccggatctcagtggtggtggtggtggtgctcgacatcctcggggtcttccggggcgagttctggctggctagcccgtttgatctcgtgagtgactataaatcaaccctgaatttgccggaaacagggttcccgatgcgtggcgatctcgccaagcgcgaaccgggaatgctggcgcgttggactgatgatgatctgtacggcatcatccgtgcggctaaaaaaggcaaaaaaaccttcattctgcatgatggccctccttatgcgaatggcagcattcatattgggcactctgttaaaaagatgctgaaagacattatcgtgaagtccaaagggctttccggttatgactcgccgtatgtgcctggctgggactgccacggtctgccgatcgagctgaaagtcgagcaagaatacggtaagccgggtgagaaatttttatcatgcaactcgtaggacaggtgccggcagcgctctgggtcattttcggcgaggaccgctttcgctggagcgcgacgatgatcggcctgtcgcttgcggtattcggaatcttgcacgccctcgctcaagccttcgtcactggtcaacttacattaattgcgttgcgctcactgcccgctttccagtcgggaaacctgtcgtgccagctgcattaatgaatcggccaacgcgcggggagaggcggtttgcgtattgggcgccagggtggtttttcttttcaccagtgagacgggcaacagctgattgcccttcaccgcctggccctgagagagttgcagcaagcggtccacgctggtttgccccagcaggcgaaaatcctgtttgatggtggttaacggcgggatataacatgagctgtcttcggtatcgtcgtatcccactaccgagatgtccgcaccaacgcgcagcccggactcggtaatggcgcgcattgcgcccagcgccatctgatcgttggcaaccagcatcgcagtgggaacgatgccctcattcagcatttgcatggtttgttgaaaaccggacatggcactccagtcgccttcccgttccgctatcggctgaatttgattgcgagtgagatatttatgccagccagccagacgcagacgcgccgagacagaacttaatgggcccgctaacagcgcgatttgctggtgacccaatgcgaccagatgctccacgcccagtcgcgtaccgtcttcatgggagaaaataatactgttgatgggtgtctggtcagagacatcaagaaataacgccggaacattagtgcaggcagcttccacagcaatggcatcctggtcatccagcggatagttaatgatcagcccactgacgcgttgcgcgagaagattgtgcaccgccgctttacaggcttcgacgccgcttcgttctaccatcgacaccaccacgctggcacccagttgatcggcgcgagatttaatcgccgcgacaatttgcgacggcgcgtgcagggccagactggaggtggcaacgccaatcagcaacgactgtttgcccgccagttgttgtgccacgcggttgggaatgtaattcagctccgccatcgccgcttccactttttcccgcgttttcgcagaaacgtggctggcctggttcaccacgcgggaaacggtctgataagagacaccggcatactctgcgacatcgtataacgttactggtttcacattcaccaccctgaattgactctcttccgggcgctatcatgccataccgcgaaaggttttgcgccattcgatggtgtccgggatctcgacgctctcccttatgcgactcctgcattaggaaattaatacgactcactataggggaattgtgagcggataacaattacccgtttttttgggctagcgattgaaaacgatgcaattcaaagtctacacctataagcgcgagtcccgttaccgccttttcgtagacgtccagtccgatattattgacacgccgggtcgtcgcatggtgatcccattggcgtctgcgcgtctgctttccgataaagtttctcgtgagctttatccagttgtccatattggagatgaatcctggcgtatgatgacaacggacatggcttctgtaccggtctcagttatcggcgaagaagtcgctgatttatcacaccgtgaaaatgatattaaaaatgctattaacttaatgttttggggaatctaatgcgcatgatcgtgctcctgtcgttgggatccccgggtaccgagctcgaattcactggccgtcgttttacctcctgtcgttgaggacccggctaggctggcggggttgccttactggttagcagaatgaatcaccgatacgcgagcgaacgtgaagcgactgctgctgcaaaacgtctgcgacctgagcaacaacatgaatggtcttcggtttccgtgtttcgtaaagtctggaaacgcggaagtcagcgccctgcaccattatgttccggatctgcatcgcaggatgctgctggctaccctgtggaacacctacatctgtattaacgaagcgctggcattgaccctgagtgatttttctctggtcccgccgcatccataccgccagttgtttaccctcacaacgttccagtaaccgggcatgttcatcatcagtaacccgtatcgtgagcatcctctctcgtttcatcggtatcattacccccatgaacagaaatcccccttacacggaggcatcagtgaccaaacaggaaaaaaccgcccttaacatggcccgctttatcagaagccagacattaacgcttctggagaaactcaacgagctggacgcggatgaacaggcagacatctgtgaatcgcttcacgaccacgctgatgagctttaccgcagctgcctcgcgcgtttcggtgatgacggtgaaaacctctgacacatgcagctcccggagacggtcacagcttgtctgtaagcggatgccgggagcagacaagcccgtcagggcgcgtcagcgggtgttggcgggtgtcggggcgcagccatgacccagtcacgtagcgatagcggagtgtatactggcttaactatgcggcatcagagcagattgtactgagagtgcaccatatatgcggtgtgaaataccgcacagatgcgtaaggagaaaataccgcatcaggcgctcttccgcttcctcgctcactgactcgctgcgctcggtcgttcggctgcggcgagcggtatcagctcactcaaaggcggtaatacggttatccacagaatcaggggataacgcaggaaagaacatgtgagcaaaaggccagcaaaaggccaggaaccgtaaaaaggccgcgttgctggcgtttttccataggctccgcccccctgacgagcatcacaaaaatcgacgctcaagtcagaggtggcgaaacccgacaggactataaagataccaggcgtttccccctggaagctccctcgtgcgctctcctgttccgaccctgccgcttaccggatacctgtccgcctttctcccttcgggaagcgtggcgctttctcatagctcacgctgtaggtatctcagttcggtgtaggtcgttcgctccaagctgggctgtgtgcacgaaccccccgttcagcccgaccgctgcgccttatccggtaactatcgtcttgagtccaacccggtaagacacgacttatcgccactggcagcagccactggtaacaggattagcagagcgaggtatgtaggcggtgctacagagttcttgaagtggtggcctaactacggctacactagaaggacagtatttggtatctgcgctctgctgaagccagttaccttcggaaaaagagttggtagctcttgatccggcaaacaaaccaccgctggtagcggtggtttttttgtttgcaagcagcagattacgcgcagaaaaaaaggatctcaagaagatcctttgatcttttctacggggtctgacgctcagtggaacgaaaactcacgttaagggattttggtcatgaacaataaaactgtctgcttacataaacagtaatacaaggggtgttatgagccatattcaacgggaaacgtcttgctctaggccgcgattaaattccaacatggatgctgatttatatgggtataaatgggctcgcgataatgtcgggcaatcaggtgcgacaatctatcgattgtatgggaagcccgatgcgccagagttgtttctgaaacatggcaaaggtagcgttgccaatgatgttacagatgagatggtcagactaaactggctgacggaatttatgcctcttccgaccatcaagcattttatccgtactcctgatgatgcatggttactcaccactgcgatccccgggaaaacagcattccaggtattagaagaatatcctgattcaggtgaaaatattgttgatgcgctggcagtgttcctgcgccggttgcattcgattcctgtttgtaattgtccttttaacagcgatcgcgtatttcgtctcgctcaggcgcaatcacgaatgaataacggtttggttgatgcgagtgattttgatgacgagcgtaatggctggcctgttgaacaagtctggaaagaaatgcataaacttttgccattctcaccggattcagtcgtcactcatggtgatttctcacttgataaccttatttttgacgaggggaaattaataggttgtattgatgttggacgagtcggaatcgcagaccgataccaggatcttgccatcctatggaactgcctcggtgagttttctccttcattacagaaacggctttttcaaaaatatggtattgataatcctgatatgaataaattgcagtttcatttgatgctcgatgagtttttctaagaattaattcatgagcggatacatatttgaatgtatttagaaaaataaacaaataggggttccgcgcacatttccccgaaaagtgccacctgaaattgtaaacgttaatattttgttaaaattcgcgttaaatttttgttaaatcagctcattttttaaccaataggccgaaatcggcaaaatcccttataaatcaaaagaatagaccgagatagggttgagtgttgttccagtttggaacaagagtccactattaaagaacgtggactccaacgtcaaagggcgaaaaaccgtctatcagggcgatggcccactacgtgaaccatcaccctaatcaagttttttggggtcgaggtgccgtaaagcactaaatcggaaccctaaagggagcccccgatttagagcttgacggggaaagccggcgaacgtggcgagaaaggaagggaagaaagcgaaaggagcgggcgctagggcgctggcaagtgtagcggtcacgctgcgcgtaaccaccacacccgccgcgcttaatgcgccgctacagggcgcgtcccattcgcca

SEQ ID NO: 319 - DNA, 7226 bp, Escherichia coli
  misc_feature (1)..(7226): 133956 plasmid
  misc_feature (1646)..(5365): SuCms1
  misc_feature (5518)..(5577): guide RNA
  misc_feature (5518)..(5553): guide RNA direct repeat portion
ccgcggcaaagccgtttttccataggctccgcccccctgacaagcatcacgaaatctgacgctcaaatcagtggtggcgaaacccgacaggactataaagataccaggcgtttcccctggcggctccctcgtgcgctctcctgttcctgcctttcggtttaccggtgtcattccgctgttatggccgcgtttgtctcattccacgcctgacactcagttccgggtaggcagttcgctccaagctggactgtatgcacgaaccccccgttcagtccgaccgctgcgccttatccggtaactatcgtcttgagtccaacccggaaagacatgcaaaagcaccactggcagcagccactggtaattgatttagaggagttagtcttgaagtcatgcgccggttaaggctaaactgaaaggacaagttttggtgactgcgctcctccaagccagttacctcggttcaaagagttggtagctcagagaaccttcgaaaaaccgccctgcaaggcggttttttcgttttcagagcaagagattacgcgcagaccaaaacgatctcaagaagatcatcttattaatcagataaaatatttctagatttcagtgcaatttatctcttcaaatgtagcacctgaagtcagccccatacgatataagttgtaattctcatgttagtcatgccccgcgcccaccggaaggagctgactgggttgaaggctctcaagggcatcggtcgagatcccggtgcctaatgagtgagctaactttcggcgagaagcaggtgcgcattatgaaccggactcgcacttcagttgcttctcaagtccacagataatcagttccaggccaaacaggaacgctggttcagcaccttggtggtcgaaaagctcaatagcctggcgcaacaatggtggcatgctatccgtagttggggtctcacgttcttccttcgcgacctggtgctcctggtcttccaatacacagcccagggtaaagtgccccacggcactcagcgcgtacagagcgttttcaagagaaaatccctgttggcaaagaaaggctaactgattttccaaagtctcatactgcttctccgttgggcgagtacctaaatgtactttagcgccatcgcgatgggataacaacgcgcaacgaaaagatttcgcattattacgcagaaagtcctgccatgattccccctccaaagggcaaaaatgtgtatggtggcggtccaacatctcgatggccagggcatctaataaggcacgcttattcttcacgtgccagtacaatgtgggctgctccacgcctaacttctgggccagcttacgagtagtcaagccctcaattccgacttcgtttaacagctctaatgcgctgttaataactttcgatttatcaagacgagacatattcaccaccctgaattgactctcttccgggcgctatcatgccataccgcgaaaggttttgcgccattcgatggtgtcctcgagttggtaacgaatcagacaattgacggcttgacggagtagcatagctcgagtccctatcagtgatagagattgacatccctatcagtgatagagatactgagcaccccctgtagaaataattttgtttaactttaataaggagatataccatggagcatcaccatcaccatcaccttcacgctttcactaatcagtatcaactttctaaaacattgagattcggagcaactctgaaagaagacgagaaaaaatgcaagagtcatgaggaacttaaaggatttgtagatatttcatatgaaaacatgaaatcttccgctacaatcgctgaaagtttgaacgaaaatgaacttgtgaaaaaatgcgaaaggtgttattctgagatcgtgaaatttcataacgcttgggagaaaatctactacaggacagatcaaattgctgtctataaagatttctataggcaactgtcaagaaaagctagatttgatgccggtaagcaaaattcacaactgataaccttagcttccctttgcggtatgtaccaaggagctaagttaagtagatacataaccaattattggaaagataacattactaggcagaaatcatttcttaaagatttttcccaacagttacatcaatacactcgtgcactggaaaagtctgataaggctcatacaaaacctaatctgatcaacttcaataagacctttatggtgttggccaatctcgtgaacgaaatagttattcctctttctaatggagccatctcttttccaaacatctctaagctggaggacggggaagagtcccatcttatagaatttgcactcaatgactattctcagttgtctgaattaattggtgaattgaaggatgcaatagccactaacggtggttacacaccatttgcaaaggtgacccttaatcattatacagcagaacagaaaccacacgtatttaaaaatgatattgatgctaaaatacgtgagctcaagttgattgggttggttgagaccttgaaaggaaaatccagtgaacagattgaggaatacttctcaaatttagacaagtttagcacatacaacgataggaaccaatcagtaatcgtaagaactcaatgctttaagtataaacccattccttttttggttaagcatcaacttgcaaagtacatttcagaaccaaacggttgggatgaagacgccgtagctaaggttctggatgctgttggagctattcgttctccagcacatgattacgctaataaccaagaggggtttgatttaaaccattatcctattaaagtcgctttcgattatgcttgggagcagttggctaattctttgtataccaccgtgacttttccccaagaaatgtgcgaaaaatatttaaatagtatctacggttgtgaagtctccaaggagcctgtatttaaattctatgctgatctgctttatatcaggaagaatctggctgtactcgaacataagaacaatctgcccagtaatcaggaagagttcatatgtaagatcaacaacacatttgagaacatcgtgttaccatataagatttctcaatttgaaacttataagaaggatatacttgcctggataaacgatgggcatgaccataaaaaatatactgatgcaaaacagcaattaggttttattaggggtggactcaagggtaggattaaggcagaagaagtgtcccagaaagacaaatatggaaaaatcaagtcttattatgagaacccttacactaaactcaccaacgaatttaagcaaatatcctctacttatgggaagaccttcgctgagttaagagacaaatttaaagagaagaatgagatcaccaaaattacccacttcggtattataatagaagataaaaacagagacagatatttacttgcaagcgagttgaagcacgaacaaatcaaccacgtcagtactatccttaacaagttagataaatcatctgaatttattacctatcaagttaagagccttacaagcaaaacattgattaaattgattaaaaatcacaccacaaagaagggagccatttcaccatatgctgattttcacactagtaaaaccggattcaacaagaatgaaatcgaaaagaattgggataattataagagagaacaggtattggttgagtatgtcaaagattgtctgaccgatagtactatggcaaaaaaccagaactgggcagagttcggttggaattttgagaaatgcaactcctatgaggatatcgaacacgaaatcgaccaaaaatcatatttgctgcagagcgatacaattagcaagcagagtattgcttccctcgtggaggggggctgtcttctccttcctataattaaccaagatataacaagcaaggagaggaaggataaaaatcaattttcaaaagattggaaccatattttcgaaggttccaaagaattccgtctccacccagagttcgcagttagctacaggacacctattgaagggtatccggtacagaagaggtacgggcgtctgcagttcgtttgcgcttttaatgcacacatcgttccacaaaatggtgagttcatcaatttgaaaaagcagatcgagaactttaacgatgaagacgttcagaaacgtaatgtgactgaattcaataaaaaggtgaatcatgcactttccgacaaagaatacgtcgttattggtatcgatagaggcctcaaacagcttgccacactctgtgttttagacaaaagaggtaaaattcttggagattttgagatctacaaaaaggaatttgtgcgtgctgaaaaaagaagcgagagtcattgggaacacacacaagcagaaaccagacatatcttggatctttccaatttgcgtgtggagacaacaatagagggtaaaaaggttctcgtggaccagagcctcacacttgtgaaaaagaatcgtgatacaccagatgaggaagctactgaagaaaataaacagaaaatcaagttgaagcagctcagctatattagaaaattgcagcataagatgcagactaacgaacaggacgttttagatttaattaataatgaaccatcagatgaagaatttaagaaaagaatcgaggggcttatttccagttttggagaaggacagaagtacgctgaccttccaattaatactatgagagaaatgatctctgatctccagggagttatcgctagaggaaacaaccaaacagagaaaaataaaattattgaattagatgctgcagacaaccttaaacaaggtattgtagctaacatgatcggaattgttaattacatcttcgctaagtattcatacaaggcttacatctctcttgaggatttgtcaagagcctatggaggtgcaaagtccggttatgacggaaggtatctgccatcaacttcacaagacgaggatgtagatttcaaggaacagcagaatcagatgcttgcaggtttgggtacctaccaattcttcgagatgcagcttctgaaaaaacttcaaaagattcagagtgataacaccgttctgagattcgtgcccgctttcagatctgcagataactatagaaatattttgagacttgaggaaactaaatataagtctaagccgttcggcgttgttcatttcatagatccaaagtttacatcaaagaaatgccccgtctgtagcaaaacaaatgtatacagggacaaggatgacatcttggtttgcaaagagtgcggttttaggagcgactcccaattaaaagaaagagagaataacattcattatattcacaacggggacgataacggtgcataccacatcgcccttaagagcgttgagaatcttattcagatgaagtaattaacctagtctgctgccaccgctgagcaataactagcataaccccttggggcctctaaacgggtcttgaggggttttttgctgaaaggaggaactatatccgggggatccgaattcttgacagctagctcagtcctaggtataatgctagcgtctaaaccgacccaataatttctactgttgtagattggagcaacacctgaaggaaggctccctcgagtctggtaaagaaaccgctgctgcgaaatttgaacgccagcacatggactcgtctactagcgcagcttaattaacctaggctgctgccaccgctgagcaataactagcataaccccttggggcctctaaacgggtcttgaggggttttttgctgaaacctcaggcatttgagaagcacacggtcacactgcttccggtagtcaataaaccggtaaaccagcaatagacataagcggctatttaacgaccctgccctgaaccgacgaccgggtcgaatttgctttcgaatttctgccattcatccgcttattatcacttattcaggcgtagcaccaggcgtttaagggcaccaataactgccttaaaaaaattacgccccgccctgccactcatcgcagtactgttgtaattcattaagcattctgccgacatggaagccatcacagacggcatgatgaacctgaatcgccagcggcatcagcaccttgtcgccttgcgtataatatttgcccatagtgaaaacgggggcgaagaagttgtccatattggccacgtttaaatcaaaactggtgaaactcacccagggattggctgagacgaaaaacatattctcaataaaccctttagggaaataggccaggttttcaccgtaacacgccacatcttgcgaatatatgtgtagaaactgccggaaatcgtcgtggtattcactccagagcgatgaaaacgtttcagtttgctcatggaaaacggtgtaacaagggtgaacactatcccatatcaccagctcaccgtctttcattgccatacggaactccggatgagcattcatcaggcgggcaagaatgtgaataaaggccggataaaacttgtgcttatttttctttacggtctttaaaaaggccgtaatatccagctgaacggtctggttataggtacattgagcaactgactgaaatgcctcaaaatgttctttacgatgccattgggatatatcaacggtggtatatccagtgatttttttctccattttagcttccttagctcctgaaaatctcgataactcaaaaaatacgcccggtagtgatcttatttcattatggtgaaagttggaacctcttacgtgccgatcaacgtctcattttcgccaaaagttggcccagggcttcccggtatcaacagggacaccaggatttatttattctgcgaagtgatcttccgtcacaggtatttattcggcgcaaagtgcgtcgggtgatgctgccaacttactgatttagtgtatgatggtgtttttgaggtgctccagtggcttctgtttctatcagctgtccctcctgttcagctactgacggggtggtgcgtaacggcaaaagcaccgccggacatcagcgctagcggagtgtatactggcttactatgttggcactgatgagggtgtcagtgaagtgcttcatgtggcaggagaaaaaaggctgcaccggtgcgtcagcagaatatgtgatacaggatatattccgcttcctcgctcactgactcgctacgctcggtcgttcgactgcggcgagcggaaatggcttacgaacggggcggagatttcctggaagatgccaggaagatacttaacagggaagtgagaggg

SEQ ID NO: 320 - DNA, 7226 bp, Escherichia coli; identical to SEQ ID NO: 319
  misc_feature (1)..(7226): 134136 plasmid
  misc_feature (1646)..(5365): SuCms1
  misc_feature (5518)..(5577): guide RNA
  misc_feature (5518)..(5553): guide RNA direct repeat portion

SEQ ID NO: 321 - DNA, 3939 bp, Escherichia coli
  misc_feature (1)..(3939): 133870 plasmid
  misc_feature (216)..(564): ileS3 gene
  misc_feature (412)..(435): gRNA target
atccggatatagttcctcctttcagcaaaaaacccctcaagacccgtttagaggccccaaggggttatgctagttattgctcagcggtggcagcagccaactcagcttcctttcgggctttgttagcagccggatctcagtggtggtggtggtggtgctcgacatcctcggggtcttccggggcgagttctggctggctagcccgtttgatctcgtgagtgactataaatcaaccctgaatttgccggaaacagggttcccgatgcgtggcgatctcgccaagcgcgaaccgggaatgctggcgcgttggactgatgatgatctgtacggcatcatccgtgcggctaaaaaaggcaaaaaaaccttcattctgcatgatggccctccttatgcgaatggcagcattcatattgggcactctgttaaaaagatgctgaaagacattatcgtgaagtccaaagggctttccggttatgactcgccgtatgtgcctggctgggactgccacggtctgccgatcgagctgaaagtcgagcaagaatacggtaagccgggtgagaaatttttatcatgcaactcgtaggacaggtgccggcagcgctctgggtcattttcggcgaggaccgctttcgctggagcgcgacgatgatcggcctgtcgcttgcggtattcggaatcttgcacgccctcgctcaagccttcgtcactggtcccgccaccaaacgtttcggcgagaagcaggccattatcgccggcatggcggccccacgggtgcgcatgatcgtgctcctgtcgttgaggacccggctaggctggcggggttgccttactggttagcagaatgaatcaccgatacgcgagcgaacgtgaagcgactgctgctgcaaaacgtctgcgacctgagcaacaacatgaatggtcttcggtttccgtgtttcgtaaagtctggaaacgcggaagtcagcgccctgcaccattatgttccggatctgcatcgcaggatgctgctggctaccctgtggaacacctacatctgtattaacgaagcgctggcattgaccctgagtgatttttctctggtcccgccgcatccataccgccagttgtttaccctcacaacgttccagtaaccgggcatgttcatcatcagtaacccgtatcgtgagcatcctctctcgtttcatcggtatcattacccccatgaacagaaatcccccttacacggaggcatcagtgaccaaacaggaaaaaaccgcccttaacatggcccgctttatcagaagccagacattaacgcttctggagaaactcaacgagctggacgcggatgaacaggcagacatctgtgaatcgcttcacgaccacgctgatgagctttaccgcagctgcctcgcgcgtttcggtgatgacggtgaaaacctctgacacatgcagctcccggagacggtcacagcttgtctgtaagcggatgccgggagcagacaagcccgtcagggcgcgtcagcgggtgttggcgggtgtcggggcgcagccatgacccagtcacgtagcgatagcggagtgtatactggcttaactatgcggcatcagagcagattgtactgagagtgcaccatatatgcggtgtgaaataccgcacagatgcgtaaggagaaaataccgcatcaggcgctcttccgcttcctcgctcactgactcgctgcgctcggtcgttcggctgcggcgagcggtatcagctcactcaaaggcggtaatacggttatccacagaatcaggggataacgcaggaaagaacatgtgagcaaaaggccagcaaaaggccaggaaccgtaaaaaggccgcgttgctggcgtttttccataggctccgcccccctgacgagcatcacaaaaatcgacgctcaagtcagaggtggcgaaacccgacaggactataaagataccaggcgtttccccctggaagctccctcgtgcgctctcctgttccgaccctgccgcttaccggatacctgtccgcctttctcccttcgggaagcgtggcgctttctcatagctcacgctgtaggtatctcagttcggtgtaggtcgttcgctccaagctgggctgtgtgcacgaaccccccgttcagcccgaccgctgcgccttatccggtaactatcgtcttgagtccaacccggtaagacacgacttatcgccactggcagcagccactggtaacaggattagcagagcgaggtatgtaggcggtgctacagagttcttgaagtggtggcctaactacggctacactagaaggacagtatttggtatctgcgctctgctgaagccagttaccttcggaaaaagagttggtagctcttgatccggcaaacaaaccaccgctggtagcggtggtttttttgtttgcaagcagcagattacgcgcagaaaaaaaggatctcaagaagatcctttgatcttttctacggggtctgacgctcagtggaacgaaaactcacgttaagggattttggtcatgaacaataaaactgtctgcttacataaacagtaatacaaggggtgttatgagccatattcaacgggaaacgtcttgctctaggccgcgattaaattccaacatggatgctgatttatatgggtataaatgggctcgcgataatgtcgggcaatcaggtgcgacaatctatcgattgtatgggaagcccgatgcgccagagttgtttctgaaacatggcaaaggtagcgttgccaatgatgttacagatgagatggtcagactaaactggctgacggaatttatgcctcttccgaccatcaagcattttatccgtactcctgatgatgcatggttactcaccactgcgatccccgggaaaacagcattccaggtattagaagaatatcctgattcaggtgaaaatattgttgatgcgctggcagtgttcctgcgccggttgcattcgattcctgtttgtaattgtccttttaacagcgatcgcgtatttcgtctcgctcaggcgcaatcacgaatgaataacggtttggttgatgcgagtgattttgatgacgagcgtaatggctggcctgttgaacaagtctggaaagaaatgcataaacttttgccattctcaccggattcagtcgtcactcatggtgatttctcacttgataaccttatttttgacgaggggaaattaataggttgtattgatgttggacgagtcggaatcgcagaccgataccaggatcttgccatcctatggaactgcctcggtgagttttctccttcattacagaaacggctttttcaaaaatatggtattgataatcctgatatgaataaattgcagtttcatttgatgctcgatgagtttttctaagaattaattcatgagcggatacatatttgaatgtatttagaaaaataaacaaataggggttccgcgcacatttccccgaaaagtgccacctgaaattgtaaacgttaatattttgttaaaattcgcgttaaatttttgttaaatcagctcattttttaaccaataggccgaaatcggcaaaatcccttataaatcaaaagaatagaccgagatagggttgagtgttgttccagtttggaacaagagtccactattaaagaacgtggactccaacgtcaaagggcgaaaaaccgtctatcagggcgatggcccactacgtgaaccatcaccctaatcaagttttttggggtcgaggtgccgtaaagcactaaatcggaaccctaaagggagcccccgatttagagcttgacggggaaagccggcgaacgtggcgagaaaggaagggaagaaagcgaaaggagcgggcgctagggcgctggcaagtgtagcggtcacgctgcgcgtaaccaccacacccgccgcgcttaatgcgccgctacagggcgcgtcccattcgcca

SEQ ID NO: 322 - DNA, 7341 bp, Escherichia coli
  misc_feature (1)..(7341): 133938 plasmid
  misc_feature (1650)..(5480): Pb2Cpf1
  misc_feature (5633)..(5692): guide RNA
  misc_feature (5633)..(5668): guide RNA direct repeat portion
ccgcggcaaagccgtttttccataggctccgcccccctgacaagcatcacgaaatctgacgctcaaatcagtggtggcgaaacccgacaggactataaagataccaggcgtttcccctggcggctccctcgtgcgctctcctgttcctgcctttcggtttaccggtgtcattccgctgttatggccgcgtttgtctcattccacgcctgacactcagttccgggtaggcagttcgctccaagctggactgtatgcacgaaccccccgttcagtccgaccgctgcgccttatccggtaactatcgtcttgagtccaacccggaaagacatgcaaaagcaccactggcagcagccactggtaattgatttagaggagttagtcttgaagtcatgcgccggttaaggctaaactgaaaggacaagttttggtgactgcgctcctccaagccagttacctcggttcaaagagttggtagctcagagaaccttcgaaaaaccgccctgcaaggcggttttttcgttttcagagcaagagattacgcgcagaccaaaacgatctcaagaagatcatcttattaatcagataaaatatttctagatttcagtgcaatttatctcttcaaatgtagcacctgaagtcagccccatacgatataagttgtaattctcatgttagtcatgccccgcgcccaccggaaggagctgactgggttgaaggctctcaagggcatcggtcgagatcccggtgcctaatgagtgagctaactttcggcgagaagcaggtgcgcattatgaaccggactcgcacttcagttgcttctcaagtccacagataatcagttccaggccaaacaggaacgctggttcagcaccttggtggtcgaaaagctcaatagcctggcgcaacaatggtggcatgctatccgtagttggggtctcacgttcttccttcgcgacctggtgctcctggtcttccaatacacagcccagggtaaagtgccccacggcactcagcgcgtacagagcgttttcaagagaaaatccctgttggcaaagaaaggctaactgattttccaaagtctcatactgcttctccgttgggcgagtacctaaatgtactttagcgccatcgcgatgggataacaacgcgcaacgaaaagatttcgcattattacgcagaaagtcctgccatgattccccctccaaagggcaaaaatgtgtatggtggcggtccaacatctcgatggccagggcatctaataaggcacgcttattcttcacgtgccagtacaatgtgggctgctccacgcctaacttctgggccagcttacgagtagtcaagccctcaattccgacttcgtttaacagctctaatgcgctgttaataactttcgatttatcaagacgagacatattcaccaccctgaattgactctcttccgggcgctatcatgccataccgcgaaaggttttgcgccattcgatggtgtcctcgagttggtaacgaatcagacaattgacggcttgacggagtagcatagctcgagtccctatcagtgatagagattgacatccctatcagtgatagagagagatactgagcaccccctgtagaaataattttgtttaactttaataaggagatataccatggccccaaagaagaaacggaaggttatgcaaataaacaacctcaagatcatatatatgaagttcacagatttcaccggcctgtatagcttgtccaagactctcaggttcgagttgaagccgatcgggaagacactcgaaaacataaaaaaggcgggacttttggagcaagatcagcatagggcggactcctacaagaaggtgaagaaaatcattgatgaatatcacaaggcttttatagaaaagtcgctttctaatttcgaactcaaataccaatcggaagacaagctcgactcgttggaagaatatctgatgtactactcgatgaagagaattgaaaagaccgaaaaagataagttcgccaaaatccaggacaacctcagaaaacagatcgcggaccaccttaaaggcgatgagtcttacaaaacaatattttccaaggatttgatcaggaagaatttgccggacttcgtcaagagcgacgaggaacggactttgattaaggagtttaaggacttcaccacgtactttaaagggttctacgaaaatagagagaatatgtacagcgcggaggataaaagcaccgccatctcccatagaatcatccacgagaatctccctaagtttgtggataacataaacgcgttctccaaaataatcctcatcccagagctgcgggagaagctcaatcagatataccaggacttcgaagagtacctgaacgtggagtcaattgatgaaatattccatcttgactacttcagcatggttatgacacaaaagcagatcgaagtctataacgccattattggcgggaagtctaccaacgacaagaagatacaggggcttaatgagtatattaatctgtataaccaaaagcacaaagattgcaagttgccaaagctgaaactgttgttcaagcagattcttagcgaccggatagcgatctcttggctcccggataacttcaaggatgatcaggaggcgcttgactcaatagatacatgctacaagaatctcctgaatgacgggaacgtgcttggggaaggaaatctgaagctgctgctcgagaacatagatacatacaatctgaagggaatttttattagaaatgatctccaactgacagatatttcacagaagatgtacgcttcttggaatgtcattcaagatgcagttattcttgatttgaaaaagcaggtttcccgcaagaagaaggagagcgcggaagattacaacgatagactgaagaagctctatacgagccaggagagcttttcgatacagtacctcaacgactgcttgagggcgtacgggaaaacagaaaacattcaagattactttgcgaaactgggggcggtcaacaacgagcacgagcagacgatcaacttgtttgcacaagttaggaacgcctatacttccgttcaagccatcctcacaacaccgtaccctgagaatgccaacttggctcaggacaaagagaccgtcgcacttatcaagaacctccttgattcactgaagcgccttcaaaggtttatcaaacctctcctcggcaagggcgatgagagcgacaaggacgagcgcttctacggagacttcactcccctttgggagacgctcaaccaaataaccccattgtataatatggtgagaaactacatgacaaggaaaccttattcgcaggagaaaataaagctcaattttgaaaactctaccttgcttgggggatgggatctgaacaaagagcacgataatactgcaatcatacttcgcaagaatggtctttactacctggctatcatgaaaaaaagcgccaacaagatcttcgataaggacaaattggacaactctggcgactgttacgaaaaaatggtgtataaactgctcccaggcgccaacaaaatgcttcccaaggttttcttttccaagtcgcgcatcgacgagttcaaaccttctgagaacataatcgagaactacaagaagggaactcacaaaaaaggggccaacttcaatctcgcagattgccacaacttgatcgatttctttaaatcctctatatcgaagcatgaagactggtccaagttcaactttcatttcagcgacacctcatcttatgaggacctttcagacttctacagagaggtggagcaacaagggtactcaatctcattttgcgatgtcagcgtggagtacattaacaagatggttgagaagggggacctttacctcttccaaatctacaataaggatttctcggaattcagcaagggcacgcctaatatgcacacgctctattggaacagcctcttctcgaaagagaacctgaataatataatatacaaactcaatggccaagctgagattttcttcaggaagaagtcactcaattacaagcggccgacacacccggcgcatcaagctattaagaacaagaacaagtgtaatgagaaaaaagaatccatcttcgattatgacctcgtcaaggataagcgctacaccgttgataaatttcagtttcacgttccaattaccatgaactttaagtctacaggaaataccaatataaaccaacaggtcattgactatcttcgcacggaggacgatacgcacatcatcggaatcgatcggggggagcggcacctgctttatttggtggttatcgactcccatgggaaaatcgtggaacagttcaccctcaatgagattgtgaacgagtacggcggaaacatttatagaacgaattaccacgacttgctggacacgagagagcaaaacagggagaaagcgagggagtcatggcagacaatcgagaacataaaagaattgaaagagggctatatctctcaagtgattcataaaataacggatctcatgcaaaagtaccatgcagtcgtcgtgctcgaggatctcaacatgggattcatgaggggaaggcagaaggtggagaagcaggtctatcaaaaatttgaagaaatgctgatcaataaacttaattatctggtcaacaaaaaggctgatcagaatagcgctggagggctgttgcacgcctaccagctgacatcaaagttcgagtccttccagaaacttggcaagcagtctggttttcttttttacattccagcctggaatacctccaaaattgatcctgtcaccggatttgtgaacttgtttgacaccaggtacgagagcatagacaaggcgaaggcattctttggaaagttcgattccataaggtataatgcggacaaagactggttcgagtttgcgttcgactataacaacttcacaactaaagcagaggggactagaacaaattggacgatctgtacatacggttcaaggatcaggaccttcaggaatcaagcgaagaattctcaatgggacaacgaggagatcgatctgacaaaagcctacaaggcttttttcgccaaacatggaatcaatatctatgataatatcaaggaggccatagccatggaaactgagaaaagcttctttgaggacctgcttcatctgcttaaattgactctgcagatgcggaactccattaccggcacaaccactgattatctcatttcgccagtccatgactctaaaggaaacttctacgatagcaggatctgtgataatagccttcctgccaacgcggacgcgaacggcgcgtataatattgcccgcaaaggattgatgctcatacagcaaatcaaggattcgacgagctcgaaccgctttaagttctcacctattacgaataaagattggctcatttttgcacaagagaagccgtacttgaatgaccatcaccaccatcatcaccatcaccaccactaattaacctaggctgctgccaccgctgagcaataactagcataaccccttggggcctctaaacgggtcttgaggggttttttgctgaaaggaggaactatatccgggggatccgaattcttgacagctagctcagtcctaggtataatgctagcgtctaaaccgacccaataatttctactgttgtagatagcatctttttaacagagtgcccaccctcgagtctggtaaagaaaccgctgctgcgaaatttgaacgccagcacatggactcgtctactagcgcagcttaattaacctaggctgctgccaccgctgagcaataactagcataaccccttggggcctctaaacgggtcttgaggggttttttgctgaaacctcaggcatttgagaagcacacggtcacactgcttccggtagtcaataaaccggtaaaccagcaatagacataagcggctatttaacgaccctgccctgaaccgacgaccgggtcgaatttgctttcgaatttctgccattcatccgcttattatcacttattcaggcgtagcaccaggcgtttaagggcaccaataactgccttaaaaaaattacgccccgccctgccactcatcgcagtactgttgtaattcattaagcattctgccgacatggaagccatcacagacggcatgatgaacctgaatcgccagcggcatcagcaccttgtcgccttgcgtataatatttgcccatagtgaaaacgggggcgaagaagttgtccatattggccacgtttaaatcaaaactggtgaaactcacccagggattggctgagacgaaaaacatattctcaataaaccctttagggaaataggccaggttttcaccgtaacacgccacatcttgcgaatatatgtgtagaaactgccggaaatcgtcgtggtattcactccagagcgatgaaaacgtttcagtttgctcatggaaaacggtgtaacaagggtgaacactatcccatatcaccagctcaccgtctttcattgccatacggaactccggatgagcattcatcaggcgggcaagaatgtgaataaaggccggataaaacttgtgcttatttttctttacggtctttaaaaaggccgtaatatccagctgaacggtctggttataggtacattgagcaactgactgaaatgcctcaaaatgttctttacgatgccattgggatatatcaacggtggtatatccagtgatttttttctccattttagcttccttagctcctgaaaatctcgataactcaaaaaatacgcccggtagtgatcttatttcattatggtgaaagttggaacctcttacgtgccgatcaacgtctcattttcgccaaaagttggcccagggcttcccggtatcaacagggacaccaggatttatttattctgcgaagtgatcttccgtcacaggtatttattcggcgcaaagtgcgtcgggtgatgctgccaacttactgatttagtgtatgatggtgtttttgaggtgctccagtggcttctgtttctatcagctgtccctcctgttcagctactgacggggtggtgcgtaacggcaaaagcaccgccggacatcagcgctagcggagtgtatactggcttactatgttggcactgatgagggtgtcagtgaagtgcttcatgtggcaggagaaaaaaggctgcaccggtgcgtcagcagaatatgtgatacaggatatattccgcttcctcgctcactgactcgctacgctcggtcgttcgactgcggcgagcggaaatggcttacgaacggggcggagatttcctggaagatgccaggaagatacttaacagggaagtgagaggg

SEQ ID NO: 323 - DNA, 3831 bp, Prevotella bryantii B14
  misc_feature (1)..(3831): Pb2Cpf1
atggccccaaagaagaaacggaaggttatgcaaataaacaacctcaagatcatatatatgaagttcacagatttcaccggcctgtatagcttgtccaagactctcaggttcgagttgaagccgatcgggaagacactcgaaaacataaaaaaggcgggacttttggagcaagatcagcatagggcggactcctacaagaaggtgaagaaaatcattgatgaatatcacaaggcttttatagaaaagtcgctttctaatttcgaactcaaataccaatcggaagacaagctcgactcgttggaagaatatctgatgtactactcgatgaagagaattgaaaagaccgaaaaagataagttcgccaaaatccaggacaacctcagaaaacagatcgcggaccaccttaaaggcgatgagtcttacaaaacaatattttccaaggatttgatcaggaagaatttgccggacttcgtcaagagcgacgaggaacggactttgattaaggagtttaaggacttcaccacgtactttaaagggttctacgaaaatagagagaatatgtacagcgcggaggataaaagcaccgccatctcccatagaatcatccacgagaatctccctaagtttgtggataacataaacgcgttctccaaaataatcctcatcccagagctgcgggagaagctcaatcagatataccaggacttcgaagagtacctgaacgtggagtcaattgatgaaatattccatcttgactacttcagcatggttatgacacaaaagcagatcgaagtctataacgccattattggcgggaagtctaccaacgacaagaagatacaggggcttaatgagtatattaatctgtataaccaaaagcacaaagattgcaagttgccaaagctgaaactgttgttcaagcagattcttagcgaccggatagcgatctcttggctcccggataacttcaaggatgatcaggaggcgcttgactcaatagatacatgctacaagaatctcctgaatgacgggaacgtgcttggggaaggaaatctgaagctgctgctcgagaacatagatacatacaatctgaagggaatttttattagaaatgatctccaactgacagatatttcacagaagatgtacgcttcttggaatgtcattcaagatgcagttattcttgatttgaaaaagcaggtttcccgcaagaagaaggagagcgcggaagattacaacgatagactgaagaagctctatacgagccaggagagcttttcgatacagtacctcaacgactgcttgagggcgtacgggaaaacagaaaacattcaagattactttgcgaaactgggggcggtcaacaacgagcacgagcagacgatcaacttgtttgcacaagttaggaacgcctatacttccgttcaagccatcctcacaacaccgtaccctgagaatgccaacttggctcaggacaaagagaccgtcgcacttatcaagaacctccttgattcactgaagcgccttcaaaggtttatcaaacctctcctcggcaagggcgatgagagcgacaaggacgagcgcttctacggagacttcactcccctttgggagacgctcaaccaaataaccccattgtataatatggtgagaaactacatgacaaggaaaccttattcgcaggagaaaataaagctcaattttgaaaactctaccttgcttgggggatgggatctgaacaaagagcacgataatactgcaatcatacttcgcaagaatggtctttactacctggctatcatgaaaaaaagcgccaacaagatcttcgataaggacaaattggacaactctggcgactgttacgaaaaaatggtgtataaactgctcccaggcgccaacaaaatgcttcccaaggttttcttttccaagtcgcgcatcgacgagttcaaaccttctgagaacataatcgagaactacaagaagggaactcacaaaaaaggggccaacttcaatctcgcagattgccacaacttgatcgatttctttaaatcctctatatcgaagcatgaagactggtccaagttcaactttcatttcagcgacacctcatcttatgaggacctttcagacttctacagagaggtggagcaacaagggtactcaatctcattttgcgatgtcagcgtggagtacattaacaagatggttgagaagggggacctttacctcttccaaatctacaataaggatttctcggaattcagcaagggcacgcctaatatgcacacgctctattggaacagcctcttctcgaaagagaacctgaataatataatatacaaactcaatggccaagctgagattttcttcaggaagaagtcactcaattacaagcggccgacacacccggcgcatcaagctattaagaacaagaacaagtgtaatgagaaaaaagaatccatcttcgattatgacctcgtcaaggataagcgctacaccgttgataaatttcagtttcacgttccaattaccatgaactttaagtctacaggaaataccaatataaaccaacaggtcattgactatcttcgcacggaggacgatacgcacatcatcggaatcgatcggggggagcggcacctgctttatttggtggttatcgactcccatgggaaaatcgtggaacagttcaccctcaatgagattgtgaacgagtacggcggaaacatttatagaacgaattaccacgacttgctggacacgagagagcaaaacagggagaaagcgagggagtcatggcagacaatcgagaacataaaagaattgaaagagggctatatctctcaagtgattcataaaataacggatctcatgcaaaagtaccatgcagtcgtcgtgctcgaggatctcaacatgggattcatgaggggaaggcagaaggtggagaagcaggtctatcaaaaatttgaagaaatgctgatcaataaacttaattatctggtcaacaaaaaggctgatcagaatagcgctggagggctgttgcacgcctaccagctgacatcaaagttcgagtccttccagaaacttggcaagcagtctggttttcttttttacattccagcctggaatacctccaaaattgatcctgtcaccggatttgtgaacttgtttgacaccaggtacgagagcatagacaaggcgaaggcattctttggaaagttcgattccataaggtataatgcggacaaagactggttcgagtttgcgttcgactataacaacttcacaactaaagcagaggggactagaacaaattggacgatctgtacatacggttcaaggatcaggaccttcaggaatcaagcgaagaattctcaatgggacaacgaggagatcgatctgacaaaagcctacaaggcttttttcgccaaacatggaatcaatatctatgataatatcaaggaggccatagccatggaaactgagaaaagcttctttgaggacctgcttcatctgcttaaattgactctgcagatgcggaactccattaccggcacaaccactgattatctcatttcgccagtccatgactctaaaggaaacttctacgatagcaggatctgtgataatagccttcctgccaacgcggacgcgaacggcgcgtataatattgcccgcaaaggattgatgctcatacagcaaatcaaggattcgacgagctcgaaccgctttaagttctcacctattacgaataaagattggctcatttttgcacaagagaagccgtacttgaatgaccatcaccaccatcatcaccatcaccaccactaa

SEQ ID NO: 324 - protein, 1276 aa, Prevotella bryantii B14
  MISC_FEATURE (1)..(1276): Pb2Cpf1
MAPKKKRKVMQINNLKIIYMKFTDFTGLYSLSKTLRFELKPIGKTLENIKKAGLLEQDQHRADSYKKVKKIIDEYHKAFIEKSLSNFELKYQSEDKLDSLEEYLMYYSMKRIEKTEKDKFAKIQDNLRKQIADHLKGDESYKTIFSKDLIRKNLPDFVKSDEERTLIKEFKDFTTYFKGFYENRENMYSAEDKSTAISHRIIHENLPKFVDNINAFSKIILIPELREKLNQIYQDFEEYLNVESIDEIFHLDYFSMVMTQKQIEVYNAIIGGKSTNDKKIQGLNEYINLYNQKHKDCKLPKLKLLFKQILSDRIAISWLPDNFKDDQEALDSIDTCYKNLLNDGNVLGEGNLKLLLENIDTYNLKGIFIRNDLQLTDISQKMYASWNVIQDAVILDLKKQVSRKKKESAEDYNDRLKKLYTSQESFSIQYLNDCLRAYGKTENIQDYFAKLGAVNNEHEQTINLFAQVRNAYTSVQAILTTPYPENANLAQDKETVALIKNLLDSLKRLQRFIKPLLGKGDESDKDERFYGDFTPLWETLNQITPLYNMVRNYMTRKPYSQEKIKLNFENSTLLGGWDLNKEHDNTAIILRKNGLYYLAIMKKSANKIFDKDKLDNSGDCYEKMVYKLLPGANKMLPKVFFSKSRIDEFKPSENIIENYKKGTHKKGANFNLADCHNLIDFFKSSISKHEDWSKFNFHFSDTSSYEDLSDFYREVEQQGYSISFCDVSVEYINKMVEKGDLYLFQIYNKDFSEFSKGTPNMHTLYWNSLFSKENLNNIIYKLNGQAEIFFRKKSLNYKRPTHPAHQAIKNKNKCNEKKESIFDYDLVKDKRYTVDKFQFHVPITMNFKSTGNTNINQQVIDYLRTEDDTHIIGIDRGERHLLYLVVIDSHGKIVEQFTLNEIVNEYGGNIYRTNYHDLLDTREQNREKARESWQTIENIKELKEGYISQVIHKITDLMQKYHAVVVLEDLNMGFMRGRQKVEKQVYQKFEEMLINKLNYLVNKKADQNSAGGLLHAYQLTSKFESFQKLGKQSGFLFYIPAWNTSKIDPVTGFVNLFDTRYESIDKAKAFFGKFDSIRYNADKDWFEFAFDYNNFTTKAEGTRTNWTICTYGSRIRTFRNQAKNSQWDNEEIDLTKAYKAFFAKHGINIYDNIKEAIAMETEKSFFEDLLHLLKLTLQMRNSITGTTTDYLISPVHDSKGNFYDSRICDNSLPANADANGAYNIARKGLMLIQQIKDSTSSNRFKFSPITNKDWLIFAQEKPYLNDHHHHHHHHHH

SEQ ID NO: 325 - DNA, 5846 bp, Escherichia coli
  misc_feature (1)..(5846): 133137 plasmid
  misc_feature (740)..(763): target sequence
  misc_feature (764)..(767): TTTC PAM
atccggatatagttcctcctttcagcaaaaaacccctcaagacccgtttagaggccccaaggggttatgctagttattgctcagcggtggcagcagccaactcagcttcctttcgggctttgttagcagccggatctcagtggtggtggtggtggtgctcgacatcctcggggtcttccggggcgagttctggctggctagcccgtttgatctcgagtttttcagcaagatccccgcaagtatttgtattcactaaactttcgtaaacgaaacttgcaaaacacatcaaaccggtcaaatttggacagaaaattcagccgagaccgcaaatattcgtttcaaaacaaattactgtaaccggcgacgcagccacgggacgtggatcggacggcgcggaggtggacggaggagggatcaacggctgagatgcgttcctgcgtgccacgtggtgcgccgcgagcagataagggttcagggcgtcgcgacggggtcgagagataaggggcgcgcggcgagtggcgcgccacgtcgcgtggcccagattgcgttctccggattagagatttcgaaatatcttttcgcggagaaagaaaaaaaaattagacaaaaccaccctcggttgaggaaaaatatggggagtatttgtgcgtttttatttttgtttttgggtcgcactgttcgatcgtagcatccatgaccactgtggcatcgctgtctttgctgccgcacttgctcatcaagccttccttcaggtgttgctccagaaaggtgagttcttcttgttgttccttgaatctgtttttgttgttgttgtttggcgattcttatctttctagaggggaattgttatccgctcacaattcatttcgcgggatcgagatctcgatcctctacgccggacgcatcgtggccggcatcaccggcgccacaggtgcggttgctggcgcctatatcgccgacatcaccgatggggaagatcgggctcgccacttcgggctcatgagcgcttgtttcggcgtgggtatggtggcaggccccgtggccgggggactgttgggcgccatctccttgcatgcaccattccttgcggcggcggtgctcaacggcctcaacctactactgggctgcttcctaatgcaggagtcgcataagggagagcgtcgagatcccggacaccatcgaatggcgcaaaacctttcgcggtatggcatgatagcgcccggaagagagtcaattcagggtggtgaatgtgaaaccagtaacgttatacgatgtcgcagagtatgccggtgtctcttatcagaccgtttcccgcgtggtgaaccaggccagccacgtttctgcgaaaacgcgggaaaaagtggaagcggcgatggcggagctgaattacattcccaaccgcgtggcacaacaactggcgggcaaacagtcgttgctgattggcgttgccacctccagtctggccctgcacgcgccgtcgcaaattgtcgcggcgattaaatctcgcgccgatcaactgggtgccagcgtggtggtgtcgatggtagaacgaagcggcgtcgaagcctgtaaagcggcggtgcacaatcttctcgcgcaacgcgtcagtgggctgatcattaactatccgctggatgaccaggatgccattgctgtggaagctgcctgcactaatgttccggcgttatttcttgatgtctctgaccagacacccatcaacagtattattttctcccatgaagacggtacgcgactgggcgtggagcatctggtcgcattgggtcaccagcaaatcgcgctgttagcgggcccattaagttctgtctcggcgcgtctgcgtctggctggctggcataaatatctcactcgcaatcaaattcagccgatagcggaacgggaaggcgactggagtgccatgtccggttttcaacaaaccatgcaaatgctgaatgagggcatcgttcccactgcgatgctggttgccaacgatcagatggcgctgggcgcaatgcgcgccattaccgagtccgggctgcgcgttggtgcggatatctcggtagtgggatacgacgataccgaagacagctcatgttatatcccgccgttaaccaccatcaaacaggattttcgcctgctggggcaaaccagcgtggaccgcttgctgcaactctctcagggccaggcggtgaagggcaatcagctgttgcccgtctcactggtgaaaagaaaaaccaccctggcgcccaatacgcaaaccgcctctccccgcgcgttggccgattcattaatgcagctggcacgacaggtttcccgactggaaagcgggcagtgagcgcaacgcaattaatgtaagttagctcactcattaggcaccgggatctcgaccgatgcccttgagagccttcaacccagtcagctccttccggtgggcgcggggcatgactatcgtcgccgcacttatgactgtcttctttatcatgcaactcgtaggacaggtgccggcagcgctctgggtcattttcggcgaggaccgctttcgctggagcgcgacgatgatcggcctgtcgcttgcggtattcggaatcttgcacgccctcgctcaagccttcgtcactggtcccgccaccaaacgtttcggcgagaagcaggccattatcgccggcatggcggccccacgggtgcgcatgatcgtgctcctgtcgttgaggacccggctaggctggcggggttgccttactggttagcagaatgaatcaccgatacgcgagcgaacgtgaagcgactgctgctgcaaaacgtctgcgacctgagcaacaacatgaatggtcttcggtttccgtgtttcgtaaagtctggaaacgcggaagtcagcgccctgcaccattatgttccggatctgcatcgcaggatgctgctggctaccctgtggaacacctacatctgtattaacgaagcgctggcattgaccctgagtgatttttctctggtcccgccgcatccataccgccagttgtttaccctcacaacgttccagtaaccgggcatgttcatcatcagtaacccgtatcgtgagcatcctctctcgtttcatcggtatcattacccccatgaacagaaatcccccttacacggaggcatcagtgaccaaacaggaaaaaaccgcccttaacatggcccgctttatcagaagccagacattaacgcttctggagaaactcaacgagctggacgcggatgaacaggcagacatctgtgaatcgcttcacgaccacgctgatgagctttaccgcagctgcctcgcgcgtttcggtgatgacggtgaaaacctctgacacatgcagctcccggagacggtcacagcttgtctgtaagcggatgccgggagcagacaagcccgtcagggcgcgtcagcgggtgttggcgggtgtcggggcgcagccatgacccagtcacgtagcgatagcggagtgtatactggcttaactatgcggcatcagagcagattgtactgagagtgcaccatatatgcggtgtgaaataccgcacagatgcgtaaggagaaaataccgcatcaggcgctcttccgcttcctcgctcactgactcgctgcgctcggtcgttcggctgcggcgagcggtatcagctcactcaaaggcggtaatacggttatccacagaatcaggggataacgcaggaaagaacatgtgagcaaaaggccagcaaaaggccaggaaccgtaaaaaggccgcgttgctggcgtttttccataggctccgcccccctgacgagcatcacaaaaatcgacgctcaagtcagaggtggcgaaacccgacaggactataaagataccaggcgtttccccctggaagctccctcgtgcgctctcctgttccgaccctgccgcttaccggatacctgtccgcctttctcccttcgggaagcgtggcgctttctcatagctcacgctgtaggtatctcagttcggtgtaggtcgttcgctccaagctgggctgtgtgcacgaaccccccgttcagcccgaccgctgcgccttatccggtaactatcgtcttgagtccaacccggtaagacacgacttatcgccactggcagcagccactggtaacaggattagcagagcgaggtatgtaggcggtgctacagagttcttgaagtggtggcctaactacggctacactagaaggacagtatttggtatctgcgctctgctgaagccagttaccttcggaaaaagagttggtagctcttgatccggcaaacaaaccaccgctggtagcggtggtttttttgtttgcaagcagcagattacgcgcagaaaaaaaggatctcaagaagatcctttgatcttttctacggggtctgacgctcagtggaacgaaaactcacgttaagggattttggtcatgaacaataaaactgtctgcttacataaacagtaatacaaggggtgttatgagccatattcaacgggaaacgtcttgctctaggccgcgattaaattccaacatggatgctgatttatatgggtataaatgggctcgcgataatgtcgggcaatcaggtgcgacaatctatcgattgtatgggaagcccgatgcgccagagttgtttctgaaacatggcaaaggtagcgttgccaatgatgttacagatgagatggtcagactaaactggctgacggaatttatgcctcttccgaccatcaagcattttatccgtactcctgatgatgcatggttactcaccactgcgatccccgggaaaacagcattccaggtattagaagaatatcctgattcaggtgaaaatattgttgatgcgctggcagtgttcctgcgccggttgcattcgattcctgtttgtaattgtccttttaacagcgatcgcgtatttcgtctcgctcaggcgcaatcacgaatgaataacggtttggttgatgcgagtgattttgatgacgagcgtaatggctggcctgttgaacaagtctggaaagaaatgcataaacttttgccattctcaccggattcagtcgtcactcatggtgatttctcacttgataaccttatttttgacgaggggaaattaataggttgtattgatgttggacgagtcggaatcgcagaccgataccaggatcttgccatcctatggaactgcctcggtgagttttctccttcattacagaaacggctttttcaaaaatatggtattgataatcctgatatgaataaattgcagtttcatttgatgctcgatgagtttttctaagaattaattcatgagcggatacatatttgaatgtatttagaaaaataaacaaataggggttccgcgcacatttccccgaaaagtgccacctgaaattgtaaacgttaatattttgttaaaattcgcgttaaatttttgttaaatcagctcattttttaaccaataggccgaaatcggcaaaatcccttataaatcaaaagaatagaccgagatagggttgagtgttgttccagtttggaacaagagtccactattaaagaacgtggactccaacgtcaaagggcgaaaaaccgtctatcagggcgatggcccactacgtgaaccatcaccctaatcaagttttttggggtcgaggtgccgtaaagcactaaatcggaaccctaaagggagcccccgatttagagcttgacggggaaagccggcgaacgtggcgagaaaggaagggaagaaagcgaaaggagcgggcgctagggcgctggcaagtgtagcggtcacgctgcgcgtaaccaccacacccgccgcgcttaatgcgccgctacagggcgcgtcccattcgcca

SEQ ID NO: 326 - DNA, 5848 bp, Escherichia coli
  misc_feature (1)..(5848): 133167 plasmid
  misc_feature (740)..(763): target sequence
  misc_feature (764)..(767): TGGT PAM
atccggatatagttcctcctttcagcaaaaaacccctcaagacccgtttagaggccccaaggggttatgctagttattgctcagcggtggcagcagccaactcagcttcctttcgggctttgttagcagccggatctcagtggtggtggtggtggtgctcgacatcctcggggtcttccggggcgagttctggctggctagcccgtttgatctcgagtttttcagcaagatccccgcaagtatttgtattcactaaactttcgtaaacgaaacttgcaaaacacatcaaaccggtcaaatttggacagaaaattcagccgagatcgcaaatattcgtttcaaaacaaattactgtaaccggcgacgcagccacgggacgtggatcggacggcgcggaggtggacggaggagggatcaacggctgagatgcgttcctgcgtgccacgtggtgcgccgcgagcagataagggttcagggcgtcgcgacggggtcgagagataaggggcgcgcggcgagtggcgcgccacgtcgcgtggcccagattgcgttctccggattagagatttcgaaatatcttttcgcggagaaagaaaaaaaaattagacaaaaccaccctcggttgaggaaaaatatggggagtatttgtgcgtttttatttttgtttttgggtcgcactgttcgatcgtagcatccatgaccactgtggcatcgctgtctttgctgccgcacttgctcatcaagccttccttcaggtgttgctccaaccaggtgagttcttcttgttgttccttgaatctgtttttgttgttgttgtttggcgattcttatctttctagaggggaattgttatccgctcacaattcccatttcgcgggatcgagatctcgatcctctacgccggacgcatcgtggccggcatcaccggcgccacaggtgcggttgctggcgcctatatcgccgacatcaccgatggggaagatcgggctcgccacttcgggctcatgagcgcttgtttcggcgtgggtatggtggcaggccccgtggccgggggactgttgggcgccatctccttgcatgcaccattccttgcggcggcggtgctcaacggcctcaacctactactgggctgcttcctaatgcaggagtcgcataagggagagcgtcgagatcccggacaccatcgaatggcgcaaaacctttcgcggtatggcatgatagcgcccggaagagagtcaattcagggtggtgaatgtgaaaccagtaacgttatacgatgtcgcagagtatgccggtgtctcttatcagaccgtttcccgcgtggtgaaccaggccagccacgtttctgcgaaaacgcgggaaaaagtggaagcggcgatggcggagctgaattacattcccaaccgcgtggcacaacaactggcgggcaaacagtcgttgctgattggcgttgccacctccagtctggccctgcacgcgccgtcgcaaattgtcgcggcgattaaatctcgcgccgatcaactgggtgccagcgtggtggtgtcgatggtagaacgaagcggcgtcgaagcctgtaaagcggcggtgcacaatcttctcgcgcaacgcgtcagtgggctgatcattaactatccgctggatgaccaggatgccattgctgtggaagctgcctgcactaatgttccggcgttatttcttgatgtctctgaccagacacccatcaacagtattattttctcccatgaagacggtacgcgactgggcgtggagcatctggtcgcattgggtcaccagcaaatcgcgctgttagcgggcccattaagttctgtctcggcgcgtctgcgtctggctggctggcataaatatctcactcgcaatcaaattcagccgatagcggaacgggaaggcgactggagtgccatgtccggttttcaacaaaccatgcaaatgctgaatgagggcatcgttcccactgcgatgctggttgccaacgatcagatggcgctgggcgcaatgcgcgccattaccgagtccgggctgcgcgttggtgcggatatctcggtagtgggatacgacgataccgaagacagctcatgttatatcccgccgttaaccaccatcaaacaggattttcgcctgctggggcaaaccagcgtggaccgcttgctgcaactctctcagggccaggcggtgaagggcaatcagctgttgcccgtctcactggtgaaaagaaaaaccaccctggcgcccaatacgcaaaccgcctctccccgcgcgttggccgattcattaatgcagctggcacgacaggtttcccgactggaaagcgggcagtgagcgcaacgcaattaatgtaagttagctcactcattaggcaccgggatctcgaccgatgcccttgagagccttcaacccagtcagctccttccggtgggcgcggggcatgactatcgtcgccgcacttatgactgtcttctttatcatgcaactcgtaggacaggtgccggcagcgctctgggtcattttcggcgaggaccgctttcgctggagcgcgacgatgatcggcctgtcgcttgcggtattcggaatcttgcacgccctcgctcaagccttcgtcactggtcccgccaccaaacgtttcggcgagaagcaggccattatcgccggcatggcggccccacgggtgcgcatgatcgtgctcctgtcgttgaggacccggctaggctggcggggttgccttactggttagcagaatgaatcaccgatacgcgagcgaacgtgaagcgactgctgctgcaaaacgtctgcgacctgagcaacaacatgaatggtcttcggtttccgtgtttcgtaaagtctggaaacgcggaagtcagcgccctgcaccattatgttccggatctgcatcgcaggatgctgctggctaccctgtggaacacctacatctgtattaacgaagcgctggcattgaccctgagtgatttttctctggtcccgccgcatccataccgccagttgtttaccctcacaacgttccagtaaccgggcatgttcatcatcagtaacccgtatcgtgagcatcctctctcgtttcatcggtatcattacccccatgaacagaaatcccccttacacggaggcatcagtgaccaaacaggaaaaaaccgcccttaacatggcccgctttatcagaagccagacattaacgcttctggagaaactcaacgagctggacgcggatgaacaggcagacatctgtgaatcgcttcacgaccacgctgatgagctttaccgcagctgcctcgcgcgtttcggtgatgacggtgaaaacctctgacacatgcagctcccggagacggtcacagcttgtctgtaagcggatgccgggagcagacaagcccgtcagggcgcgtcagcgggtgttggcgggtgtcggggcgcagccatgacccagtcacgtagcgatagcggagtgtatactggcttaactatgcggcatcagagcagattgtactgagagtgcaccatatatgcggtgtgaaataccgcacagatgcgtaaggagaaaataccgcatcaggcgctcttccgcttcctcgctcactgactcgctgcgctcggtcgttcggctgcggcgagcggtatcagctcactcaaaggcggtaatacggttatccacagaatcaggggataacgcaggaaagaacatgtgagcaaaaggccagcaaaaggccaggaaccgtaaaaaggccgcgttgctggcgtttttccataggctccgcccccctgacgagcatcacaaaaatcgacgctcaagtcagaggtggcgaaacccgacaggactataaagataccaggcgtttccccctggaagctccctcgtgcgctctcctgttccgaccctgccgcttaccggatacctgtccgcctttctcccttcgggaagcgtggcgctttctcatagctcacgctgtaggtatctcagttcggtgtaggtcgttcgctccaagctgggctgtgtgcacgaaccccccgttcagcccgaccgctgcgccttatccggtaactatcgtcttgagtccaacccggtaagacacgacttatcgccactggcagcagccactggtaacaggattagcagagcgaggtatgtaggcggtgctacagagttcttgaagtggtggcctaactacggctacactagaaggacagtatttggtatctgcgctctgctgaagccagttaccttcggaaaaagagttggtagctcttgatccggcaaacaaaccaccgctggtagcggtggtttttttgtttgcaagcagcagattacgcgcagaaaaaaaggatctcaagaagatcctttgatcttttctacggggtctgacgctcagtggaacgaaaactcacgttaagggattttggtcatgaacaataaaactgtctgcttacataaacagtaatacaaggggtgttatgagccatattcaacgggaaacgtcttgctctaggccgcgattaaattccaacatggatgctgatttatatgggtataaatgggctcgcgataatgtcgggcaatcaggtgcgacaatctatcgattgtatgggaagcccgatgcgccagagttgtttctgaaacatggcaaaggtagcgttgccaatgatgttacagatgagatggtcagactaaactggctgacggaatttatgcctcttccgaccatcaagcattttatccgtactcctgatgatgcatggttactcaccactgcgatccccgggaaaacagcattccaggtattagaagaatatcctgattcaggtgaaaatattgttgatgcgctggcagtgttcctgcgccggttgcattcgattcctgtttgtaattgtccttttaacagcgatcgcgtatttcgtctcgctcaggcgcaatcacgaatgaataacggtttggttgatgcgagtgattttgatgacgagcgtaatggctggcctgttgaacaagtctggaaagaaatgcataaacttttgccattctcaccggattcagtcgtcactcatggtgatttctcacttgataaccttatttttgacgaggggaaattaataggttgtattgatgttggacgagtcggaatcgcagaccgataccaggatcttgccatcctatggaactgcctcggtgagttttctccttcattacagaaacggctttttcaaaaatatggtattgataatcctgatatgaataaattgcagtttcatttgatgctcgatgagtttttctaagaattaattcatgagcggatacatatttgaatgtatttagaaaaataaacaaataggggttccgcgcacatttccccgaaaagtgccacctgaaattgtaaacgttaatattttgttaaaattcgcgttaaatttttgttaaatcagctcattttttaaccaataggccgaaatcggcaaaatcccttataaatcaaaagaatagaccgagatagggttgagtgttgttccagtttggaacaagagtccactattaaagaacgtggactccaacgtcaaagggcgaaaaaccgtctatcagggcgatggcccactacgtgaaccatcaccctaatcaagttttttggggtcgaggtgccgtaaagcactaaatcggaaccctaaagggagcccccgatttagagcttgacggggaaagccggcgaacgtggcgagaaaggaagggaagaaagcgaaaggagcgggcgctagggcgctggcaagtgtagcggtcacgctgcgcgtaaccaccacacccgccgcgcttaatgcgccgctacagggcgcgtcccattcgcca

SEQ ID NO: 327 - DNA, 7226 bp, Escherichia coli
  misc_feature (1)..(7226): 134395 plasmid
  misc_feature (1646)..(5365): SuCms1
  misc_feature (4208)..(4210): RuvCI mutation (D>A)
  misc_feature (5518)..(5577): guide RNA
  misc_feature (5518)..(5553): guide RNA direct repeat portion
ccgcggcaaagccgtttttccataggctccgcccccctgacaagcatcacgaaatctgacgctcaaatcagtggtggcgaaacccgacaggactataaagataccaggcgtttcccctggcggctccctcgtgcgctctcctgttcctgcctttcggtttaccggtgtcattccgctgttatggccgcgtttgtctcattccacgcctgacactcagttccgggtaggcagttcgctccaagctggactgtatgcacgaaccccccgttcagtccgaccgctgcgccttatccggtaactatcgtcttgagtccaacccggaaagacatgcaaaagcaccactggcagcagccactggtaattgatttagaggagttagtcttgaagtcatgcgccggttaaggctaaactgaaaggacaagttttggtgactgcgctcctccaagccagttacctcggttcaaagagttggtagctcagagaaccttcgaaaaaccgccctgcaaggcggttttttcgttttcagagcaagagattacgcgcagaccaaaacgatctcaagaagatcatcttattaatcagataaaatatttctagatttcagtgcaatttatctcttcaaatgtagcacctgaagtcagccccatacgatataagttgtaattctcatgttagtcatgccccgcgcccaccggaaggagctgactgggttgaaggctctcaagggcatcggtcgagatcccggtgcctaatgagtgagctaactttcggcgagaagcaggtgcgcattatgaaccggactcgcacttcagttgcttctcaagtccacagataatcagttccaggccaaacaggaacgctggttcagcaccttggtggtcgaaaagctcaatagcctggcgcaacaatggtggcatgctatccgtagttggggtttcacgttcttccttcgcgacctggtgctcctggtcttccaatacacagcccagggtaaagtgccccacggcactcagcgcgtacagagcgttttcaagagaaaatccctgttggcaaagaaaggctaactgattttccaaagtctcatactgcttctccgttgggcgagtacctaaatgtactttagcgccatcgcgatgggataacaacgcgcaacgaaaagatttcgcattattacgcagaaagtcctgccatgattccccctccaaagggcaaaaatgtgtatggtggcggtccaacatctcgatggccagggcatctaataaggcacgcttattcttcacgtgccagtacaatgtgggctgctccacgcctaacttctgggccagcttacgagtagtcaagccctcaattccgacttcgtttaacagctctaatgcgctgttaataactttcgatttatcaagacgagacatattcaccaccctgaattgactctcttccgggcgctatcatgccataccgcgaaaggttttgcgccattcgatggtgtcctcgagttggtaacgaatcagacaattgacggcttgacggagtagcatagctcgagtccctatcagtgatagagattgacatccctatcagtgatagagatactgagcaccccctgtagaaataattttgtttaactttaataaggagatataccatggagcatcaccatcaccatcaccttcacgctttcactaatcagtatcaactttctaaaacattgagattcggagcaactctgaaagaagacgagaaaaaatgcaagagtcatgaggaacttaaaggatttgtagatatttcatatgaaaacatgaaatcttccgctacaatcgctgaaagtttgaacgaaaatgaacttgtgaaaaaatgcgaaaggtgttattctgagatcgtgaaatttcataacgcttgggagaaaatctactacaggacagatcaaattgctgtctataaagatttctataggcaactgtcaagaaaagctagatttgatgccggtaagcaaaattcacaactgataaccttagcttccctttgcggtatgtaccaaggagctaagttaagtagatacataaccaattattggaaagataacattactaggcagaaatcatttcttaaagatttttcccaacagttacatcaatacactcgtgcactggaaaagtctgataaggctcatacaaaacctaatctgatcaacttcaataagacctttatggtgttggccaatctcgtgaacgaaatagttattcctctttctaatggagccatctcttttccaaacatctctaagctggaggacggggaagagtcccatcttatagaatttgcactcaatgactattctcagttgtctgaattaattggtgaattgaaggatgcaatagccactaacggtggttacacaccatttgcaaaggtgacccttaatcattatacagcagaacagaaaccacacgtatttaaaaatgatattgatgctaaaatacgtgagctcaagttgattgggttggttgagaccttgaaaggaaaatccagtgaacagattgaggaatacttctcaaatttagacaagtttagcacatacaacgataggaaccaatcagtaatcgtaagaactcaatgctttaagtataaacccattccttttttggttaagcatcaacttgcaaagtacatttcagaaccaaacggttgggatgaagacgccgtagctaaggttctggatgctgttggagctattcgttctccagcacatgattacgctaataaccaagaggggtttgatttaaaccattatcctattaaagtcgctttcgattatgcttgggagcagttggctaattctttgtataccaccgtgacttttccccaagaaatgtgcgaaaaatatttaaatagtatctacggttgtgaagtctccaaggagcctgtatttaaattctatgctgatctgctttatatcaggaagaatctggctgtactcgaacataagaacaatctgcccagtaatcaggaagagttcatatgtaagatcaacaacacatttgagaacatcgtgttaccatataagatttctcaatttgaaacttataagaaggatatacttgcctggataaacgatgggcatgaccataaaaaatatactgatgcaaaacagcaattaggttttattaggggtggactcaagggtaggattaaggcagaagaagtgtcccagaaagacaaatatggaaaaatcaagtcttattatgagaacccttacactaaactcaccaacgaatttaagcaaatatcctctacttatgggaagaccttcgctgagttaagagacaaatttaaagagaagaatgagatcaccaaaattacccacttcggtattataatagaagataaaaacagagacagatatttacttgcaagcgagttgaagcacgaacaaatcaaccacgtcagtactatccttaacaagttagataaatcatctgaatttattacctatcaagttaagagccttacaagcaaaacattgattaaattgattaaaaatcacaccacaaagaagggagccatttcaccatatgctgattttcacactagtaaaaccggattcaacaagaatgaaatcgaaaagaattgggataattataagagagaacaggtattggttgagtatgtcaaagattgtctgaccgatagtactatggcaaaaaaccagaactgggcagagttcggttggaattttgagaaatgcaactcctatgaggatatcgaacacgaaatcgaccaaaaatcatatttgctgcagagcgatacaattagcaagcagagtattgcttccctcgtggaggggggctgtcttctccttcctataattaaccaagatataacaagcaaggagaggaaggataaaaatcaattttcaaaagattggaaccatattttcgaaggttccaaagaattccgtctccacccagagttcgcagttagctacaggacacctattgaagggtatccggtacagaagaggtacgggcgtctgcagttcgtttgcgcttttaatgcacacatcgttccacaaaatggtgagttcatcaatttgaaaaagcagatcgagaactttaacgatgaagacgttcagaaacgtaatgtgactgaattcaataaaaaggtgaatcatgcactttccgacaaagaatacgtcgttattggtatcgctagaggcctcaaacagcttgccacactctgtgttttagacaaaagaggtaaaattcttggagattttgagatctacaaaaaggaatttgtgcgtgctgaaaaaagaagcgagagtcattgggaacacacacaagcagaaaccagacatatcttggatctttccaatttgcgtgtggagacaacaatagagggtaaaaaggttctcgtggaccagagcctcacacttgtgaaaaagaatcgtgatacaccagatgaggaagctactgaagaaaataaacagaaaatcaagttgaagcagctcagctatattagaaaattgcagcataagatgcagactaacgaacaggacgttttagatttaattaataatgaaccatcagatgaagaatttaagaaaagaatcgaggggcttatttccagttttggagaaggacagaagtacgctgaccttccaattaatactatgagagaaatgatctctgatctccagggagttatcgctagaggaaacaaccaaacagagaaaaataaaattattgaattagatgctgcagacaaccttaaacaaggtattgtagctaacatgatcggaattgttaattacatcttcgctaagtattcatacaaggcttacatctctcttgaggatttgtcaagagcctatggaggtgcaaagtccggttatgacggaaggtatctgccatcaacttcacaagacgaggatgtagatttcaaggaacagcagaatcagatgcttgcaggtttgggtacctaccaattcttcgagatgcagcttctgaaaaaacttcaaaagattcagagtgataacaccgttctgagattcgtgcccgctttcagatctgcagataactatagaaatattttgagacttgaggaaactaaatataagtctaagccgttcggcgttgttcatttcatagatccaaagtttacatcaaagaaatgccccgtctgtagcaaaacaaatgtatacagggacaaggatgacatcttggtttgcaaagagtgcggttttaggagcgactcccaattaaaagaaagagagaataacattcattatattcacaacggggacgataacggtgcataccacatcgcccttaagagcgttgagaatcttattcagatgaagtaattaacctagtctgctgccaccgctgagcaataactagcataaccccttggggcctctaaacgggtcttgaggggttttttgctgaaaggaggaactatatccgggggatccgaattcttgacagctagctcagtcctaggtataatgctagcgtctaaaccgacccaataatttctactgttgtagatagcatctttttaacagagtgcccaccctcgagtctggtaaagaaaccgctgctgcgaaatttgaacgccagcacatggactcgtctactagcgcagcttaattaacctaggctgctgccaccgctgagcaataactagcataaccccttggggcctctaaacgggtcttgaggggttttttgctgaaacctcaggcatttgagaagcacacggtcacactgcttccggtagtcaataaaccggtaaaccagcaatagacataagcggctatttaacgaccctgccctgaaccgacgaccgggtcgaatttgctttcgaatttctgccattcatccgcttattatcacttattcaggcgtagcaccaggcgtttaagggcaccaataactgccttaaaaaaattacgccccgccctgccactcatcgcagtactgttgtaattcattaagcattctgccgacatggaagccatcacagacggcatgatgaacctgaatcgccagcggcatcagcaccttgtcgccttgcgtataatatttgcccatagtgaaaacgggggcgaagaagttgtccatattggccacgtttaaatcaaaactggtgaaactcacccagggattggctgagacgaaaaacatattctcaataaaccctttagggaaataggccaggttttcaccgtaacacgccacatcttgcgaatatatgtgtagaaactgccggaaatcgtcgtggtattcactccagagcgatgaaaacgtttcagtttgctcatggaaaacggtgtaacaagggtgaacactatcccatatcaccagctcaccgtctttcattgccatacggaactccggatgagcattcatcaggcgggcaagaatgtgaataaaggccggataaaacttgtgcttatttttctttacggtctttaaaaaggccgtaatatccagctgaacggtctggttataggtacattgagcaactgactgaaatgcctcaaaatgttctttacgatgccattgggatatatcaacggtggtatatccagtgatttttttctccattttagcttccttagctcctgaaaatctcgataactcaaaaaatacgcccggtagtgatcttatttcattatggtgaaagttggaacctcttacgtgccgatcaacgtctcattttcgccaaaagttggcccagggcttcccggtatcaacagggacaccaggatttatttattctgcgaagtgatcttccgtcacaggtatttattcggcgcaaagtgcgtcgggtgatgctgccaacttactgatttagtgtatgatggtgtttttgaggtgctccagtggcttctgtttctatcagctgtccctcctgttcagctactgacggggtggtgcgtaacggcaaaagcaccgccggacatcagcgctagcggagtgtatactggcttactatgttggcactgatgagggtgtcagtgaagtgcttcatgtggcaggagaaaaaaggctgcaccggtgcgtcagcagaatatgtgatacaggatatattccgcttcctcgctcactgactcgctacgctcggtcgttcgactgcggcgagcggaaatggcttacgaacggggcggagatttcctggaagatgccaggaagatacttaacagggaagtgagaggg

SEQ ID NO: 328 - DNA, 7226 bp, Escherichia coli
  misc_feature (1)..(7226): 134396 plasmid
  misc_feature (1646)..(1792): disrupted SuCms1
  misc_feature (5518)..(5577): guide RNA
  misc_feature (5518)..(5553): guide RNA direct repeat portion
ccgcggcaaagccgtttttccataggctccgcccccctgacaagcatcacgaaatctgacgctcaaatcagtggtggcgaaacccgacaggactataaagataccaggcgtttcccctggcggctccctcgtgcgctctcctgttcctgcctttcggtttaccggtgtcattccgctgttatggccgcgtttgtctcattccacgcctgacactcagttccgggtaggcagttcgctccaagctggactgtatgcacgaaccccccgttcagtccgaccgctgcgccttatccggtaactatcgtcttgagtccaacccggaaagacatgcaaaagcaccactggcagcagccactggtaattgatttagaggagttagtcttgaagtcatgcgccggttaaggctaaactgaaaggacaagttttggtgactgcgctcctccaagccagttacctcggttcaaagagttggtagctcagagaaccttcgaaaaaccgccctgcaaggcggttttttcgttttcagagcaagagattacgcgcagaccaaaacgatctcaagaagatcatcttattaatcagataaaatatttctagatttcagtgcaatttatctcttcaaatgtagcacctgaagtcagccccatacgatataagttgtaattctcatgttagtcatgccccgcgcccaccggaaggagctgactgggttgaaggctctcaagggcatcggtcgagatcccggtgcctaatgagtgagctaactttcggcgagaagcaggtgcgcattatgaaccggactcgcacttcagttgcttctcaagtccacagataatcagttccaggccaaacaggaacgctggttcagcaccttggtggtcgaaaagctcaatagcctggcgcaacaatggtggcatgctatccgtagttggggtttcacgttcttccttcgcgacctggtgctcctggtcttccaatacacagcccagggtaaagtgccccacggcactcagcgcgtacagagcgttttcaagagaaaatccctgttggcaaagaaaggctaactgattttccaaagtctcatactgcttctccgttgggcgagtacctaaatgtactttagcgccatcgcgatgggataacaacgcgcaacgaaaagatttcgcattattacgcagaaagtcctgccatgattccccctccaaagggcaaaaatgtgtatggtggcggtccaacatctcgatggccagggcatctaataaggcacgcttattcttcacgtgccagtacaatgtgggctgctccacgcctaacttctgggccagcttacgagtagtcaagccctcaattccgacttcgtttaacagctctaatgcgctgttaataactttcgatttatcaagacgagacatattcaccaccctgaattgactctcttccgggcgctatcatgccataccgcgaaaggttttgcgccattcgatggtgtcctcgagttggtaacgaatcagacaattgacggcttgacggagtagcatagctcgagtccctatcagtgatagagattgacatccctatcagtgatagagatactgagcaccccctgtagaaataattttgtttaactttaataaggagatataccatggagcatcaccatcaccatcaccttcacgctttcactaatcagtatcaactttctaaaacattgagattcggagcaactctgaaagaagacgagaaaaaatgcaagagtcatgaggaacttaaaggatttgtagatatttcataagaaaacatgaaatcttccgctacaatcgctgaaagtttgaacgaaaatgaacttgtgaaaaaatgcgaaaggtgttattctgagatcgtgaaatttcataacgcttgggagaaaatctactacaggacagatcaaattgctgtctataaagatttctataggcaactgtcaagaaaagctagatttgatgccggtaagcaaaattcacaactgataaccttagcttccctttgcggtatgtaccaaggagctaagttaagtagatacataaccaattattggaaagataacattactaggcagaaatcatttcttaaagatttttcccaacagttacatcaatacactcgtgcactggaaaagtctgataaggctcatacaaaacctaatctgatcaacttcaataagacctttatggtgttggccaatctcgtgaacgaaatagttattcctctttctaatggagccatctcttttccaaacatctctaagctggaggacggggaagagtcccatcttatagaatttgcactcaatgactattctcagttgtctgaattaattggtgaattgaaggatgcaatagccactaacggtggttacacaccatttgcaaaggtgacccttaatcattatacagcagaacagaaaccacacgtatttaaaaatgatattgatgctaaaatacgtgagctcaagttgattgggttggttgagaccttgaaaggaaaatccagtgaacagattgaggaatacttctcaaatttagacaagtttagcacatacaacgataggaaccaatcagtaatcgtaagaactcaatgctttaagtataaacccattccttttttggttaagcatcaacttgcaaagtacatttcagaaccaaacggttgggatgaagacgccgtagctaaggttctggatgctgttggagctattcgttctccagcacatgattacgctaataaccaagaggggtttgatttaaaccattatcctattaaagtcgctttcgattatgcttgggagcagttggctaattctttgtataccaccgtgacttttccccaagaaatgtgcgaaaaatatttaaatagtatctacggttgtgaagtctccaaggagcctgtatttaaattctatgctgatctgctttatatcaggaagaatctggctgtactcgaacataagaacaatctgcccagtaatcaggaagagttcatatgtaagatcaacaacacatttgagaacatcgtgttaccatataagatttctcaatttgaaacttataagaaggatatacttgcctggataaacgatgggcatgaccataaaaaatatactgatgcaaaacagcaattaggttttattaggggtggactcaagggtaggattaaggcagaagaagtgtcccagaaagacaaatatggaaaaatcaagtcttattatgagaacccttacactaaactcaccaacgaatttaagcaaatatcctctacttatgggaagaccttcgctgagttaagagacaaatttaaagagaagaatgagatcaccaaaattacccacttcggtattataatagaagataaaaacagagacagatatttacttgcaagcgagttgaagcacgaacaaatcaaccacgtcagtactatccttaacaagttagataaatcatctgaatttattacctatcaagttaagagccttacaagcaaaacattgattaaattgattaaaaatcacaccacaaagaagggagccatttcaccatatgctgattttcacactagtaaaaccggattcaacaagaatgaaatcgaaaagaattgggataattataagagagaacaggtattggttgagtatgtcaaagattgtctgaccgatagtactatggcaaaaaaccagaactgggcagagttcggttggaattttgagaaatgcaactcctatgaggatatcgaacacgaaatcgaccaaaaatcatatttgctgcagagcgatacaattagcaagcagagtattgcttccctcgtggaggggggctgtcttctccttcctataattaaccaagatataacaagcaaggagaggaaggataaaaatcaattttcaaaagattggaaccatattttcgaaggttccaaagaattccgtctccacccagagttcgcagttagctacaggacacctattgaagggtatccggtacagaagaggtacgggcgtctgcagttcgtttgcgcttttaatgcacacatcgttccacaaaatggtgagttcatcaatttgaaaaagcagatcgagaactttaacgatgaagacgttcagaaacgtaatgtgactgaattcaataaaaaggtgaatcatgcactttccgacaaagaatacgtcgttattggtatcgatagaggcctcaaacagcttgccacactctgtgttttagacaaaagaggtaaaattcttggagattttgagatctacaaaaaggaatttgtgcgtgctgaaaaaagaagcgagagtcattgggaacacacacaagcagaaaccagacatatcttggatctttccaatttgcgtgtggagacaacaatagagggtaaaaaggttctcgtggaccagagcctcacacttgtgaaaaagaatcgtgatacaccagatgaggaagctactgaagaaaataaacagaaaatcaagttgaagcagctcagctatattagaaaattgcagcataagatgcagactaacgaacaggacgttttagatttaattaataatgaaccatcagatgaagaatttaagaaaagaatcgaggggcttatttccagttttggagaaggacagaagtacgctgaccttccaattaatactatgagagaaatgatctctgatctccagggagttatcgctagaggaaacaaccaaacagagaaaaataaaattattgaattagatgctgcagacaaccttaaacaaggtattgtagctaacatgatcggaattgttaattacatcttcgctaagtattcatacaaggcttacatctctcttgaggatttgtcaagagcctatggaggtgcaaagtccggttatgacggaaggtatctgccatcaacttcacaagacgaggatgtagatttcaaggaacagcagaatcagatgcttgcaggtttgggtacctaccaattcttcgagatgcagcttctgaaaaaacttcaaaagattcagagtgataacaccgttctgagattcgtgcccgctttcagatctgcagataactatagaaatattttgagacttgaggaaactaaatataagtctaagccgttcggcgttgttcatttcatagatccaaagtttacatcaaagaaatgccccgtctgtagcaaaacaaatgtatacagggacaaggatgacatcttggtttgcaaagagtgcggttttaggagcgactcccaattaaaagaaagagagaataacattcattatattcacaacggggacgataacggtgcataccacatcgcccttaagagcgttgagaatcttattcagatgaagtaattaacctagtctgctgccaccgctgagcaataactagcataaccccttggggcctctaaacgggtcttgaggggttttttgctgaaaggaggaactatatccgggggatccgaattcttgacagctagctcagtcctaggtataatgctagcgtctaaaccgacccaataatttctactgttgtagatagcatctttttaacagagtgcccaccctcgagtctggtaaagaaaccgctgctgcgaaatttgaacgccagcacatggactcgtctactagcgcagcttaattaacctaggctgctgccaccgctgagcaataactagcataaccccttggggcctctaaacgggtcttgaggggttttttgctgaaacctcaggcatttgagaagcacacggtcacactgcttccggtagtcaataaaccggtaaaccagcaatagacataagcggctatttaacgaccctgccctgaaccgacgaccgggtcgaatttgctttcgaatttctgccattcatccgcttattatcacttattcaggcgtagcaccaggcgtttaagggcaccaataactgccttaaaaaaattacgccccgccctgccactcatcgcagtactgttgtaattcattaagcattctgccgacatggaagccatcacagacggcatgatgaacctgaatcgccagcggcatcagcaccttgtcgccttgcgtataatatttgcccatagtgaaaacgggggcgaagaagttgtccatattggccacgtttaaatcaaaactggtgaaactcacccagggattggctgagacgaaaaacatattctcaataaaccctttagggaaataggccaggttttcaccgtaacacgccacatcttgcgaatatatgtgtagaaactgccggaaatcgtcgtggtattcactccagagcgatgaaaacgtttcagtttgctcatggaaaacggtgtaacaagggtgaacactatcccatatcaccagctcaccgtctttcattgccatacggaactccggatgagcattcatcaggcgggcaagaatgtgaataaaggccggataaaacttgtgcttatttttctttacggtctttaaaaaggccgtaatatccagctgaacggtctggttataggtacattgagcaactgactgaaatgcctcaaaatgttctttacgatgccattgggatatatcaacggtggtatatccagtgatttttttctccattttagcttccttagctcctgaaaatctcgataactcaaaaaatacgcccggtagtgatcttatttcattatggtgaaagttggaacctcttacgtgccgatcaacgtctcattttcgccaaaagttggcccagggcttcccggtatcaacagggacaccaggatttatttattctgcgaagtgatcttccgtcacaggtatttattcggcgcaaagtgcgtcgggtgatgctgccaacttactgatttagtgtatgatggtgtttttgaggtgctccagtggcttctgtttctatcagctgtccctcctgttcagctactgacggggtggtgcgtaacggcaaaagcaccgccggacatcagcgctagcggagtgtatactggcttactatgttggcactgatgagggtgtcagtgaagtgcttcatgtggcaggagaaaaaaggctgcaccggtgcgtcagcagaatatgtgatacaggatatattccgcttcctcgctcactgactcgctacgctcggtcgttcgactgcggcgagcggaaatggcttacgaacggggcggagatttcctggaagatgccaggaagatacttaacagggaagtgagaggg

SEQ ID NO: 329 - DNA, 5847 bp, Escherichia coli
  misc_feature (1)..(5847): pOD7 plasmid
tggcgaatgggacgcgccctgtagcggcgcattaagcgcggcgggtgtggtggttacgcgcagcgtgaccgctacacttgccagcgccctagcgcccgctcctttcgctttcttcccttcctttctcgccacgttcgccggctttccccgtcaagctctaaatcgggggctccctttagggttccgatttagtgctttacggcacctcgaccccaaaaaacttgattagggtgatggttcacgtagtgggccatcgccctgatagacggtttttcgccctttgacgttggagtccacgttctttaatagtggactcttgttccaaactggaacaacactcaaccctatctcggtctattcttttgatttataagggattttgccgatttcggcctattggttaaaaaatgagctgatttaacaaaaatttaacgcgaattttaacaaaatattaacgtttacaatttcaggtggcacttttcggggaaatgtgcgcggaacccctatttgtttatttttctaaatacattcaaatatgtatccgctcatgaattaattcttagaaaaactcatcgagcatcaaatgaaactgcaatttattcatatcaggattatcaataccatatttttgaaaaagccgtttctgtaatgaaggagaaaactcaccgaggcagttccataggatggcaagatcctggtatcggtctgcgattccgactcgtccaacatcaatacaacctattaatttcccctcgtcaaaaataaggttatcaagtgagaaatcaccatgagtgacgactgaatccggtgagaatggcaaaagtttatgcatttctttccagacttgttcaacaggccagccattacgctcgtcatcaaaatcactcgcatcaaccaaaccgttattcattcgtgattgcgcctgagcgagacgaaatacgcgatcgctgttaaaaggacaattacaaacaggaatcgaatgcaaccggcgcaggaacactgccagcgcatcaacaatattttcacctgaatcaggatattcttctaatacctggaatgctgttttcccggggatcgcagtggtgagtaaccatgcatcatcaggagtacggataaaatgcttgatggtcggaagaggcataaattccgtcagccagtttagtctgaccatctcatctgtaacatcattggcaacgctacctttgccatgtttcagaaacaactctggcgcatcgggcttcccatacaatcgatagattgtcgcacctgattgcccgacattatcgcgagcccatttatacccatataaatcagcatccatgttggaatttaatcgcggcctagagcaagacgtttcccgttgaatatggctcataacaccccttgtattactgtttatgtaagcagacagttttattgttcatgaccaaaatcccttaacgtgagttttcgttccactgagcgtcagaccccgtagaaaagatcaaaggatcttcttgagatcctttttttctgcgcgtaatctgctgcttgcaaacaaaaaaaccaccgctaccagcggtggtttgtttgccggatcaagagctaccaactctttttccgaaggtaactggcttcagcagagcgcagataccaaatactgtccttctagtgtagccgtagttaggccaccacttcaagaactctgtagcaccgcctacatacctcgctctgctaatcctgttaccagtggctgctgccagtggcgataagtcgtgtcttaccgggttggactcaagacgatagttaccggataaggcgcagcggtcgggctgaacggggggttcgtgcacacagcccagcttggagcgaacgacctacaccgaactgagatacctacagcgtgagctatgagaaagcgccacgcttcccgaagggagaaaggcggacaggtatccggtaagcggcagggtcggaacaggagagcgcacgagggagcttccagggggaaacgcctggtatctttatagtcctgtcgggtttcgccacctctgacttgagcgtcgatttttgtgatgctcgtcaggggggcggagcctatggaaaaacgccagcaacgcggcctttttacggttcctggccttttgctggccttttgctcacatgttctttcctgcgttatcccctgattctgtggataaccgtattaccgcctttgagtgagctgataccgctcgccgcagccgaacgaccgagcgcagcgagtcagtgagcgaggaagcggaagagcgcctgatgcggtattttctccttacgcatctgtgcggtatttcacaccgcatatatggtgcactctcagtacaatctgctctgatgccgcatagttaagccagtatacactccgctatcgctacgtgactgggtcatggctgcgccccgacacccgccaacacccgctgacgcgccctgacgggcttgtctgctcccggcatccgcttacagacaagctgtgaccgtctccgggagctgcatgtgtcagaggttttcaccgtcatcaccgaaacgcgcgaggcagctgcggtaaagctcatcagcgtggtcgtgaagcgattcacagatgtctgcctgttcatccgcgtccagctcgttgagtttctccagaagcgttaatgtctggcttctgataaagcgggccatgttaagggcggttttttcctgtttggtcactgatgcctccgtgtaagggggatttctgttcatgggggtaatgataccgatgaaacgagagaggatgctcacgatacgggttactgatgatgaacatgcccggttactggaacgttgtgagggtaaacaactggcggtatggatgcggcgggaccagagaaaaatcactcagggtcaatgccagcgcttcgttaatacagatgtaggtgttccacagggtagccagcagcatcctgcgatgcagatccggaacataatggtgcagggcgctgacttccgcgtttccagactttacgaaacacggaaaccgaagaccattcatgttgttgctcaggtcgcagacgttttgcagcagcagtcgcttcacgttcgctcgcgtatcggtgattcattctgctaaccagtaaggcaaccccgccagcctagccgggtcctcaacgacaggagcacgatcatgcgcacccgtggggccgccatgccggcgataatggcctgcttctcgccgaaacgtttggtggcgggaccagtgacgaaggcttgagcgagggcgtgcaagattccgaataccgcaagcgacaggccgatcatcgtcgcgctccagcgaaagcggtcctcgccgaaaatgacccagagcgctgccggcacctgtcctacgagttgcatgataaagaagacagtcataagtgcggcgacgatagtcatgccccgcgcccaccggaaggagctgactgggttgaaggctctcaagggcatcggtcgagatcccggtgcctaatgagtgagctaacttacattaattgcgttgcgctcactgcccgctttccagtcgggaaacctgtcgtgccagctgcattaatgaatcggccaacgcgcggggagaggcggtttgcgtattgggcgccagggtggtttttcttttcaccagtgagacgggcaacagctgattgcccttcaccgcctggccctgagagagttgcagcaagcggtccacgctggtttgccccagcaggcgaaaatcctgtttgatggtggttaacggcgggatataacatgagctgtcttcggtatcgtcgtatcccactaccgagatatccgcaccaacgcgcagcccggactcggtaatggcgcgcattgcgcccagcgccatctgatcgttggcaaccagcatcgcagtgggaacgatgccctcattcagcatttgcatggtttgttgaaaaccggacatggcactccagtcgccttcccgttccgctatcggctgaatttgattgcgagtgagatatttatgccagccagccagacgcagacgcgccgagacagaacttaatgggcccgctaacagcgcgatttgctggtgacccaatgcgaccagatgctccacgcccagtcgcgtaccgtcttcatgggagaaaataatactgttgatgggtgtctggtcagagacatcaagaaataacgccggaacattagtgcaggcagcttccacagcaatggcatcctggtcatccagcggatagttaatgatcagcccactgacgcgttgcgcgagaagattgtgcaccgccgctttacaggcttcgacgccgcttcgttctaccatcgacaccaccacgctggcacccagttgatcggcgcgagatttaatcgccgcgacaatttgcgacggcgcgtgcagggccagactggaggtggcaacgccaatcagcaacgactgtttgcccgccagttgttgtgccacgcggttgggaatgtaattcagctccgccatcgccgcttccactttttcccgcgttttcgcagaaacgtggctggcctggttcaccacgcgggaaacggtctgataagagacaccggcatactctgcgacatcgtataacgttactggtttcacattcaccaccctgaattgactctcttccgggcgctatcatgccataccgcgaaaggttttgcgccattcgatggtgtccgggatctcgacgctctcccttatgcgactcctgcattaggaagcagcccagtagtaggttgaggccgttgagcaccgccgccgcaaggaatggtgcatgcaaggagatggcgcccaacagtcccccggccacggggcctgccaccatacccacgccgaaacaagcgctcatgagcccgaagtggcgagcccgatcttccccatcggtgatgtcggcgatataggcgccagcaaccgcacctgtggcgccggtgatgccggccacgatgcgtccggcgtagaggatcgagatctcgatcccgcgaaatgaattgtgagcggataacaattcccctctagaaagataagaatcgccaaacaacaacaacaaaaacagattcaaggaacaacaagaagaactcaccnnnnntggagcaacacctgaaggaaggcttgatgagcaagtgcggcagcaaagacagcgatgccacagtggtcatggatgctacgatcgaacagtgcgacccaaaaacaaaaataaaaacgcacaaatactccccatatttttcctcaaccgagggtggttttgtctaatttttttttctttctccgcgaaaagatatttcgaaatctctaatccggagaacgcaatctgggccacgcgacgtggcgcgccactcgccgcgcgccccttatctctcgaccccgtcgcgacgccctgaacccttatctgctcgcggcgcaccacgtggcacgcaggaacgcatctcagccgttgatccctcctccgtccacctccgcgccgtccgatccacgtcccgtggctgcgtcgccggttacagtaatttgttttgaaacgaatatttgcgatctcggctgaattttctgtccaaatttgaccggtttgatgtgttttgcaagtttcgtttacgaaagtttagtgaatacaaatacttgcggggatcttgctgaaaaactcgagatcaaacgggctagccagccagaactcgccccggaagaccccgaggatgtcgagcaccaccaccaccaccactgagatccggctgctaacaaagcccgaaaggaagctgagttggctgctgccaccgctgagcaataactagcataaccccttggggcctctaaacgggtcttgaggggttttttgctgaaaggaggaactatatccggat

SEQ ID NO: 330 - DNA, 28 bp, Artificial
  primer
  misc_feature (1)..(28): Odpr0023_Cms1_PAM_F
nnnnnggtgagttcttcttgttgttcct

SEQ ID NO: 331 - DNA, 21 bp, Artificial
  primer
  misc_feature (1)..(21): Odpr0024_Cms1_R
tggagcaacacctgaaggaag

SEQ ID NO: 332 - DNA, 51 bp, Artificial
  primer
  misc_feature (1)..(51): ODpr0055_PAM_Illumina_F
tcgtcggcagcgtcagatgtgtataagagacagatgaccactgtggcatcg

SEQ ID NO: 333 - DNA, 56 bp, Artificial
  primer
  misc_feature (1)..(56): ODpr0056_PAM_Illumina_R
gtctcgtgggctcggagatgtgtataagagacagaagaatcgccaaacaacaacaa

SEQ ID NO: 334 - DNA, 51 bp, Artificial
  primer
  misc_feature (1)..(51): ODpr0058_i5_501_F
aatgatacggcgaccaccgagatctacactagatcgctcgtcggcagcgtc

SEQ ID NO: 335 - DNA, 51 bp, Artificial
  primer
  misc_feature (1)..(51): ODpr0059_i5_502_F
aatgatacggcgaccaccgagatctacacctctctattcgtcggcagcgtc

SEQ ID NO: 336 - DNA, 47 bp, Artificial
  primer
  misc_feature (1)..(47): ODpr0060_i7_707_R
caagcagaagacggcatacgagatgtagagaggtctcgtgggctcgg

SEQ ID NO: 337 - DNA, 47 bp, Artificial
  primer
  misc_feature (1)..(47): ODpr0061_i7_708_R
caagcagaagacggcatacgagatcctctctggtctcgtgggctcgg

SEQ ID NO: 338 - DNA, 7647 bp, Escherichia coli
  misc_feature (1)..(7647): pOD4 plasmid
ccgcggcaaagccgtttttccataggctccgcccccctgacaagcatcacgaaatctgacgctcaaatcagtggtggcgaaacccgacaggactataaagataccaggcgtttcccctggcggctccctcgtgcgctctcctgttcctgcctttcggtttaccggtgtcattccgctgttatggccgcgtttgtctcattccacgcctgacactcagttccgggtaggcagttcgctccaagctggactgtatgcacgaaccccccgttcagtccgaccgctgcgccttatccggtaactatcgtcttgagtccaacccggaaagacatgcaaaagcaccactggcagcagccactggtaattgatttagaggagttagtcttgaagtcatgcgccggttaaggctaaactgaaaggacaagttttggtgactgcgctcctccaagccagttacctcggttcaaagagttggtagctcagagaaccttcgaaaaaccgccctgcaaggcggttttttcgttttcagagcaagagattacgcgcagaccaaaacgatctcaagaagatcatcttattaatcagataaaatatttctagatttcagtgcaatttatctcttcaaatgtagcacctgaagtcagccccatacgatataagttgtaattctcatgttagtcatgccccgcgcccaccggaaggagctgactgggttgaaggctctcaagggcatcggtcgagatcccggtgcctaatgagtgagctaacttacattaattgcgttgcgctcactgcccgctttccagtcgggaaacctgtcgtgccagctgcattaatgaatcggccaacgcgcggggagaggcggtttgcgtattgggcgccagggtggtttttcttttcaccagtgagacgggcaacagctgattgcccttcaccgcctggccctgagagagttgcagcaagcggtccacgctggtttgccccagcaggcgaaaatcctgtttgatggtggttaacggcgggatataacatgagctgtcttcggtatcgtcgtatcccactaccgagatgtccgcaccaacgcgcagcccggactcggtaatggcgcgcattgcgcccagcgccatctgatcgttggcaaccagcatcgcagtgggaacgatgccctcattcagcatttgcatggtttgttgaaaaccggacatggcactccagtcgccttcccgttccgctatcggctgaatttgattgcgagtgagatatttatgccagccagccagacgcagacgcgccgagacagaacttaatgggcccgctaacagcgcgatttgctggtgacccaatgcgaccagatgctccacgcccagtcgcgtaccgtcttcatgggagaaaataatactgttgatgggtgtctggtcagagacatcaagaaataacgccggaacattagtgcaggcagcttccacagcaatggcatcctggtcatccagcggatagttaatgatcagcccactgacgcgttgcgcgagaagattgtgcaccgccgctttacaggcttcgacgccgcttcgttctaccatcgacaccaccacgctggcacccagttgatcggcgcgagatttaatcgccgcgacaatttgcgacggcgcgtgcagggccagactggaggtggcaacgccaatcagcaacgactgtttgcccgccagttgttgtgccacgcggttgggaatgtaattcagctccgccatcgccgcttccactttttcccgcgttttcgcagaaacgtggctggcctggttcaccacgcgggaaacggtctgataagagacaccggcatactctgcgacatcgtataacgttactggtttcacattcaccaccctgaattgactctcttccgggcgctatcatgccataccgcgaaaggttttgcgccattcgatggtgtccgggatctcgacgctctcccttatgcgactcctgcattaggaaattaatacgactcactataggggaattgtgagcggataacaattcccctgtagaaataattttgtttaactttaataaggagatataccatggagcatcaccatcaccatcaccttcacgctttcactaatcagtatcaactttctaaaacattgagattcggagcaactctgaaagaagacgagaaaaaatgcaagagtcatgaggaacttaaaggatttgtagatatttcatatgaaaacatgaaatcttccgctacaatcgctgaaagtttgaacgaaaatgaacttgtgaaaaaatgcgaaaggtgttattctgagatcgtgaaatttcataacgcttgggagaaaatctactacaggacagatcaaattgctgtctataaagatttctataggcaactgtcaagaaaagctagatttgatgccggtaagcaaaattcacaactgataaccttagcttccctttgcggtatgtaccaaggagctaagttaagtagatacataaccaattattggaaagataacattactaggcagaaatcatttcttaaagatttttcccaacagttacatcaatacactcgtgcactggaaaagtctgataaggctcatacaaaacctaatctgatcaacttcaataagacctttatggtgttggccaatctcgtgaacgaaatagttattcctctttctaatggagccatctcttttccaaacatctctaagctggaggacggggaagagtcccatcttatagaatttgcactcaatgactattctcagttgtctgaattaattggtgaattgaaggatgcaatagccactaacggtggttacacaccatttgcaaaggtgacccttaatcattatacagcagaacagaaaccacacgtatttaaaaatgatattgatgctaaaatacgtgagcttaagttgattgggttggttgagaccttgaaaggaaaatccagtgaacagattgaggaatacttctcaaatttagacaagtttagcacatacaacgataggaaccaatcagtaatcgtaagaactcaatgctttaagtataaacccattccttttttggttaagcatcaacttgcaaagtacatttcagaaccaaacggttgggatgaagacgccgtagctaaggttctggatgctgttggagctattcgttctccagcacatgattacgctaataaccaagaggggtttgatttaaaccattatcctattaaagtcgctttcgattatgcttgggagcagttggctaattctttgtataccaccgtgacttttccccaagaaatgtgcgaaaaatatttaaatagtatctacggttgtgaagtctccaaggagcctgtatttaaattctatgctgatctgctttatatcaggaagaatctggctgtactcgaacataagaacaatctgcccagtaatcaggaagagttcatatgtaagatcaacaacacatttgagaacatcgtgttaccatataagatttctcaatttgaaacttataagaaggatatacttgcctggataaacgatgggcatgaccataaaaaatatactgatgcaaaacagcaattaggttttattaggggtggactcaagggtaggattaaggcagaagaagtgtcccagaaagacaaatatggaaaaatcaagtcttattatgagaacccttacactaaactcaccaacgaatttaagcaaatatcctctacttatgggaagaccttcgctgagttaagagacaaatttaaagagaagaatgagatcaccaaaattacccacttcggtattataatagaagataaaaacagagacagatatttacttgcaagcgagttgaagcacgaacaaatcaaccacgtcagtactatccttaacaagttagataaatcatctgaatttattacctatcaagttaagagccttacaagcaaaacattgattaaattgattaaaaatcacaccacaaagaagggagccatttcaccatatgctgattttcacaccagtaaaaccggattcaacaagaatgaaatcgaaaagaattgggataattataagagagaacaggtattggttgagtatgtcaaagattgtctgaccgatagtactatggcaaaaaaccagaactgggcagagttcggttggaattttgagaaatgcaactcctatgaggatatcgaacacgaaatcgaccaaaaatcatatttgctgcagagcgatacaattagcaagcagagtattgcttccctcgtggaggggggctgtcttctccttcctataattaaccaagatataacaagcaaggagaggaaggataaaaatcaattttcaaaagattggaaccatattttcgaaggttccaaagaattccgtctccacccagagttcgcagttagctacaggacacctattgaagggtatccggtacagaagaggtacgggcgtctgcagttcgtttgcgcttttaatgcacacatcgttccacaaaatggtgagttcatcaatttgaaaaagcagatcgagaactttaacgatgaagacgttcagaaacgtaatgtgactgaattcaataaaaaggtgaatcatgcactttccgacaaagaatacgtcgttattggtattgatagaggcctcaaacagcttgccacactctgtgttttagacaaaagaggtaaaattcttggagattttgagatctacaaaaaggaatttgtgcgtgctgaaaaaagaagcgagagtcattgggaacacacacaagcagaaaccagacatatcttggatctttccaatttgcgtgtggagacaacaatagagggtaaaaaggttctcgtggaccagagcctcacacttgtgaaaaagaatcgtgatacaccagatgaggaagctactgaagaaaataaacagaaaatcaagttgaagcagctcagctatattagaaaattgcagcataagatgcagactaacgaacaggacgttttagatttaattaataatgaaccatcagatgaagaatttaagaaaagaatcgaggggcttatttccagttttggagaaggacagaagtacgctgaccttccaattaatactatgagagaaatgatctctgatctccagggagttatcgctagaggaaacaaccaaacagagaaaaataaaattattgaattagatgctgcagacaaccttaaacaaggtattgtagctaacatgatcggaattgttaattacatcttcgctaagtattcatacaaggcttacatctctcttgaggatttgtcaagagcctatggaggtgcaaagtccggttatgacggaaggtatctgccatcaacttcacaagacgaggatgtagatttcaaggaacagcagaatcagatgcttgcaggtttgggtacctaccaattcttcgagatgcagcttctgaaaaaacttcaaaagattcagagtgataacaccgttctgagattcgtgcccgctttcagatctgcagataactatagaaatattttgagacttgaggaaactaaatataagtctaagccgttcggcgttgttcatttcatagatccaaagtttacatcaaagaaatgccccgtctgtagcaaaacaaatgtatacagggacaaggatgacatcttggtttgcaaagagtgcggttttaggagcgactcccaattaaaagaaagagagaataacattcattatattcacaacggggacgataacggtgcataccacatcgcccttaagagcgttgagaatcttattcagatgaagtaattaacctagtctgctgccaccgctgagcaataactagcataaccccttggggcctctaaacgggtcttgaggggttttttgctgaaaggaggaactatatccggggatcgaattctaatacgactcactataggggtccaaaggacggattaaatttctactattgtagattggagcaacacctgaaggaaggcttgatgccctcgagtctggtaaagaaaccgctgctgcgaaatttgaacgccagcacatggactcgtctactagcgcagcttaattaacctaggctgctgccaccgctgagcaataactagcataaccccttggggcctctaaacgggtcttgaggggttttttgctgaaacctcaggcatttgagaagcacacggtcacactgcttccggtagtcaataaaccggtaaaccagcaatagacataagcggctatttaacgaccctgccctgaaccgacgaccgggtcgaatttgctttcgaatttctgccattcatccgcttattatcacttattcaggcgtagcaccaggcgtttaagggcaccaataactgccttaaaaaaattacgccccgccctgccactcatcgcagtactgttgtaattcattaagcattctgccgacatggaagccatcacagacggcatgatgaacctgaatcgccagcggcatcagcaccttgtcgccttgcgtataatatttgcccatagtgaaaacgggggcgaagaagttgtccatattggccacgtttaaatcaaaactggtgaaactcacccagggattggctgagacgaaaaacatattctcaataaaccctttagggaaataggccaggttttcaccgtaacacgccacatcttgcgaatatatgtgtagaaactgccggaaatcgtcgtggtattcactccagagcgatgaaaacgtttcagtttgctcatggaaaacggtgtaacaagggtgaacactatcccatatcaccagctcaccgtctttcattgccatacggaactccggatgagcattcatcaggcgggcaagaatgtgaataaaggccggataaaacttgtgcttatttttctttacggtctttaaaaaggccgtaatatccagctgaacggtctggttataggtacattgagcaactgactgaaatgcctcaaaatgttctttacgatgccattgggatatatcaacggtggtatatccagtgatttttttctccattttagcttccttagctcctgaaaatctcgataactcaaaaaatacgcccggtagtgatcttatttcattatggtgaaagttggaacctcttacgtgccgatcaacgtctcattttcgccaaaagttggcccagggcttcccggtatcaacagggacaccaggatttatttattctgcgaagtgatcttccgtcacaggtatttattcggcgcaaagtgcgtcgggtgatgctgccaacttactgatttagtgtatgatggtgtttttgaggtgctccagtggcttctgtttctatcagctgtccctcctgttcagctactgacggggtggtgcgtaacggcaaaagcaccgccggacatcagcgctagcggagtgtatactggcttactatgttggcactgatgagggtgtcagtgaagtgcttcatgtggcaggagaaaaaaggctgcaccggtgcgtcagcagaatatgtgatacaggatatattccgcttcctcgctcactgactcgctacgctcggtcgttcgactgcggcgagcggaaatggcttacgaacggggcggagatttcctggaagatgccaggaagatacttaacagggaagtgagaggg

SEQ ID NO: 339 - DNA, 7582 bp, Escherichia coli
  misc_feature (1)..(7582): pOD49 plasmid
ccgcggcaaagccgtttttccataggctccgcccccctgacaagcatcacgaaatctgacgctcaaatcagtggtggcgaaacccgacaggactataaagataccaggcgtttcccctggcggctccctcgtgcgctctcctgttcctgcctttcggtttaccggtgtcattccgctgttatggccgcgtttgtctcattccacgcctgacactcagttccgggtaggcagttcgctccaagctggactgtatgcacgaaccccccgttcagtccgaccgctgcgccttatccggtaactatcgtcttgagtccaacccggaaagacatgcaaaagcaccactggcagcagccactggtaattgatttagaggagttagtcttgaagtcatgcgccggttaaggctaaactgaaaggacaagttttggtgactgcgctcctccaagccagttacctcggttcaaagagttggtagctcagagaaccttcgaaaaaccgccctgcaaggcggttttttcgttttcagagcaagagattacgcgcagaccaaaacgatctcaagaagatcatcttattaatcagataaaatatttctagatttcagtgcaatttatctcttcaaatgtagcacctgaagtcagccccatacgatataagttgtaattctcatgttagtcatgccccgcgcccaccggaaggagctgactgggttgaaggctctcaagggcatcggtcgagatcccggtgcctaatgagtgagctaacttacattaattgcgttgcgctcactgcccgctttccagtcgggaaacctgtcgtgccagctgcattaatgaatcggccaacgcgcggggagaggcggtttgcgtattgggcgccagggtggtttttcttttcaccagtgagacgggcaacagctgattgcccttcaccgcctggccctgagagagttgcagcaagcggtccacgctggtttgccccagcaggcgaaaatcctgtttgatggtggttaacggcgggatataacatgagctgtcttcggtatcgtcgtatcccactaccgagatgtccgcaccaacgcgcagcccggactcggtaatggcgcgcattgcgcccagcgccatctgatcgttggcaaccagcatcgcagtgggaacgatgccctcattcagcatttgcatggtttgttgaaaaccggacatggcactccagtcgccttcccgttccgctatcggctgaatttgattgcgagtgagatatttatgccagccagccagacgcagacgcgccgagacagaacttaatgggcccgctaacagcgcgatttgctggtgacccaatgcgaccagatgctccacgcccagtcgcgtaccgtcttcatgggagaaaataatactgttgatgggtgtctggtcagagacatcaagaaataacgccggaacattagtgcaggcagcttccacagcaatggcatcctggtcatccagcggatagttaatgatcagcccactgacgcgttgcgcgagaagattgtgcaccgccgctttacaggcttcgacgccgcttcgttctaccatcgacaccaccacgctggcacccagttgatcggcgcgagatttaatcgccgcgacaatttgcgacggcgcgtgcagggccagactggaggtggcaacgccaatcagcaacgactgtttgcccgccagttgttgtgccacgcggttgggaatgtaattcagctccgccatcgccgcttccactttttcccgcgttttcgcagaaacgtggctggcctggttcaccacgcgggaaacggtctgataagagacaccggcatactctgcgacatcgtataacgttactggtttcacattcaccaccctgaattgactctcttccgggcgctatcatgccataccgcgaaaggttttgcgccattcgatggtgtccgggatctcgacgctctcccttatgcgactcctgcattaggaaattaatacgactcactataggggaattgtgagcggataacaattcccctgtagaaataattttgtttaactttaataaggagatataccatggagcatcaccatcaccatcaccttcacgctttcactaatcagtatcaactttctaaaacattgagattcggagcaactctgaaagaagacgagaaaaaatgcaagagtcatgaggaacttaaaggatttgtagatatttcatatgaaaacatgaaatcttccgctacaatcgctgaaagtttgaacgaaaatgaacttgtgaaaaaatgcgaaaggtgttattctgagatcgtgaaatttcataacgcttgggagaaaatctactacaggacagatcaaattgctgtctataaagatttctataggcaactgtcaagaaaagctagatttgatgccggtaagcaaaattcacaactgataaccttagcttccctttgcggtatgtaccaaggagctaagttaagtagatacataaccaattattggaaagataacattactaggcagaaatcatttcttaaagatttttcccaacagttacatcaatacactcgtgcactggaaaagtctgataaggctcatacaaaacctaatctgatcaacttcaataagacctttatggtgttggccaatctcgtgaacgaaatagttattcctctttctaatggagccatctcttttccaaacatctctaagctggaggacggggaagagtcccatcttatagaatttgcactcaatgactattctcagttgtctgaattaattggtgaattgaaggatgcaatagccactaacggtggttacacaccatttgcaaaggtgacccttaatcattatacagcagaacagaaaccacacgtatttaaaaatgatattgatgctaaaatacgtgagcttaagttgattgggttggttgagaccttgaaaggaaaatccagtgaacagattgaggaatacttctcaaatttagacaagtttagcacatacaacgataggaaccaatcagtaatcgtaagaactcaatgctttaagtataaacccattccttttttggttaagcatcaacttgcaaagtacatttcagaaccaaacggttgggatgaagacgccgtagctaaggttctggatgctgttggagctattcgttctccagcacatgattacgctaataaccaagaggggtttgatttaaaccattatcctattaaagtcgctttcgattatgcttgggagcagttggctaattctttgtataccaccgtgacttttccccaagaaatgtgcgaaaaatatttaaatagtatctacggttgtgaagtctccaaggagcctgtatttaaattctatgctgatctgctttatatcaggaagaatctggctgtactcgaacataagaacaatctgcccagtaatcaggaagagttcatatgtaagatcaacaacacatttgagaacatcgtgttaccatataagatttctcaatttgaaacttataagaaggatatacttgcctggataaacgatgggcatgaccataaaaaatatactgatgcaaaacagcaattaggttttattaggggtggactcaagggtaggattaaggcagaagaagtgtcccagaaagacaaatatggaaaaatcaagtcttattatgagaacccttacactaaactcaccaacgaatttaagcaaatatcctctacttatgggaagaccttcgctgagttaagagacaaatttaaagagaagaatgagatcaccaaaattacccacttcggtattataatagaagataaaaacagagacagatatttacttgcaagcgagttgaagcacgaacaaatcaaccacgtcagtactatccttaacaagttagataaatcatctgaatttattacctatcaagttaagagccttacaagcaaaacattgattaaattgattaaaaatcacaccacaaagaagggagccatttcaccatatgctgattttcacaccagtaaaaccggattcaacaagaatgaaatcgaaaagaattgggataattataagagagaacaggtattggttgagtatgtcaaagattgtctgaccgatagtactatggcaaaaaaccagaactgggcagagttcggttggaattttgagaaatgcaactcctatgaggatatcgaacacgaaatcgaccaaaaatcatatttgctgcagagcgatacaattagcaagcagagtattgcttccctcgtggaggggggctgtcttctccttcctataattaaccaagatataacaagcaaggagaggaaggataaaaatcaattttcaaaagattggaaccatattttcgaaggttccaaagaattccgtctccacccagagttcgcagttagctacaggacacctattgaagggtatccggtacagaagaggtacgggcgtctgcagttcgtttgcgcttttaatgcacacatcgttccacaaaatggtgagttcatcaatttgaaaaagcagatcgagaactttaacgatgaagacgttcagaaacgtaatgtgactgaattcaataaaaaggtgaatcatgcactttccgacaaagaatacgtcgttattggtattgatagaggcctcaaacagcttgccacactctgtgttttagacaaaagaggtaaaattcttggagattttgagatctacaaaaaggaatttgtgcgtgctgaaaaaagaagcgagagtcattgggaacacacacaagcagaaaccagacatatcttggatctttccaatttgcgtgtggagacaacaatagagggtaaaaaggttctcgtggaccagagcctcacacttgtgaaaaagaatcgtgatacaccagatgaggaagctactgaagaaaataaacagaaaatcaagttgaagcagctcagctatattagaaaattgcagcataagatgcagactaacgaacaggacgttttagatttaattaataatgaaccatcagatgaagaatttaagaaaagaatcgaggggcttatttccagttttggagaaggacagaagtacgctgaccttccaattaatactatgagagaaatgatctctgatctccagggagttatcgctagaggaaacaaccaaacagagaaaaataaaattattgaattagatgctgcagacaaccttaaacaaggtattgtagctaacatgatcggaattgttaattacatcttcgctaagtattcatacaaggcttacatctctcttgaggatttgtcaagagcctatggaggtgcaaagtccggttatgacggaaggtatctgccatcaacttcacaagacgaggatgtagatttcaaggaacagcagaatcagatgcttgcaggtttgggtacctaccaattcttcgagatgcagcttctgaaaaaacttcaaaagattcagagtgataacaccgttctgagattcgtgcccgctttcagatctgcagataactatagaaatattttgagacttgaggaaactaaatataagtctaagccgttcggcgttgttcatttcatagatccaaagtttacatcaaagaaatgccccgtctgtagcaaaacaaatgtatacagggacaaggatgacatcttggtttgcaaagagtgcggttttaggagcgactcccaattaaaagaaagagagaataacattcattatattcacaacggggacgataacggtgcataccacatcgcccttaagagcgttgagaatcttattcagatgaagtaattaacctagtctgctgccaccgctgagcaataactagcataaccccttggggcctctaaacgggtcttgaggggttttttgctgaaaggaggaactatatccggggatcgaattctaatacgactcactatagggccctcgagtctggtaaagaaaccgctgctgcgaaatttgaacgccagcacatggactcgtctactagcgcagcttaattaacctaggctgctgccaccgctgagcaataactagcataaccccttggggcctctaaacgggtcttgaggggttttttgctgaaacctcaggcatttgagaagcacacggtcacactgcttccggtagtcaataaaccggtaaaccagcaatagacataagcggctatttaacgaccctgccctgaaccgacgaccgggtcgaatttgctttcgaatttctgccattcatccgcttattatcacttattcaggcgtagcaccaggcgtttaagggcaccaataactgccttaaaaaaattacgccccgccctgccactcatcgcagtactgttgtaattcattaagcattctgccgacatggaagccatcacagacggcatgatgaacctgaatcgccagcggcatcagcaccttgtcgccttgcgtataatatttgcccatagtgaaaacgggggcgaagaagttgtccatattggccacgtttaaatcaaaactggtgaaactcacccagggattggctgagacgaaaaacatattctcaataaaccctttagggaaataggccaggttttcaccgtaacacgccacatcttgcgaatatatgtgtagaaactgccggaaatcgtcgtggtattcactccagagcgatgaaaacgtttcagtttgctcatggaaaacggtgtaacaagggtgaacactatcccatatcaccagctcaccgtctttcattgccatacggaactccggatgagcattcatcaggcgggcaagaatgtgaataaaggccggataaaacttgtgcttatttttctttacggtctttaaaaaggccgtaatatccagctgaacggtctggttataggtacattgagcaactgactgaaatgcctcaaaatgttctttacgatgccattgggatatatcaacggtggtatatccagtgatttttttctccattttagcttccttagctcctgaaaatctcgataactcaaaaaatacgcccggtagtgatcttatttcattatggtgaaagttggaacctcttacgtgccgatcaacgtctcattttcgccaaaagttggcccagggcttcccggtatcaacagggacaccaggatttatttattctgcgaagtgatcttccgtcacaggtatttattcggcgcaaagtgcgtcgggtgatgctgccaacttactgatttagtgtatgatggtgtttttgaggtgctccagtggcttctgtttctatcagctgtccctcctgttcagctactgacggggtggtgcgtaacggcaaaagcaccgccggacatcagcgctagcggagtgtatactggcttactatgttggcactgatgagggtgtcagtgaagtgcttcatgtggcaggagaaaaaaggctgcaccggtgcgtcagcagaatatgtgatacaggatatattccgcttcctcgctcactgactcgctacgctcggtcgttcgactgcggcgagcggaaatggcttacgaacggggcggagatttcctggaagatgccaggaagatacttaacagggaagtgagaggg

SEQ ID NO: 340 - protein, 828 aa, Unknown
  metagenome-derived sequence
  MISC_FEATURE (1)..(828): Unk113
MDSSRGREIARASFNLNAINKISKNFDQEFSNLKKEKEEIFNFTKTDTDLFKRVDFKDLDKSTPEVYSLLKDFKAREKSRFLELISQGKIKDLKSGNIPPLFKDIKINKWEKNTNKEIFSYDIFKNFLNEKDKKKRGKYFTIRFNNYIEINNVFKRVAIKNGELKAKERSIEQEKREALLLQYWAIILESENTKSLVLIPKDKAQKANLFLRDFESLENGKDTVISFSSLTLRALEKLIRRNLGKEVPLLSDEDEQKAIILYKRVLRGDFPMLKNIGIDGFDNDIEKLLNQDFASKEDFRIALEKVAYITKRIKIDHSTLERFKNNFSVIVSEITAYDWKRNIATERKKEHTKIWEEFWGDKNQNGFFPNRINPEVRLFYRPILKQEDPKKQQNRFSKEHFGVAFTISQNAAKERMVTTFSEAKDLKAVVEKFNQEEILNNFVKKQGDNLWYFGIDRGNTELASLCVVKFSDEDYEESLQNRVVVQKKPIPALIKAYRIRDLKAEREIVIDKDQNTKVVSIYKNPSYFIDELDKYFEEVNSPCMDLTMAKLIKGKIILDGDRQTYLKLKMINGKRQLKEKFGSIDPTAQIELLENNKNKSDRKFRVKSKTGERYPYQFLPFFTAEHEKTISTEEFRLELQNYLDKLRKGEKEDEEISIEKINHLRDSLTSNMVGIIAHLFEQFPGIINLENLHKEREIESHFSSNNENLARRLEWSLYKKFQKLGLVPPQLKQTVMLRRDDKKKEGNKDGLNQFGIIHFIETKGTSARCPVCEHEKSGEERKEEKFSRHTYSCNQCGFTTDDPKAPFEFLKDSDATAAFNIAKKKLNY

SEQ ID NO: 341 - protein, 1180 aa, Unknown
  metagenome-derived sequence
  MISC_FEATURE (1)..(1180): Unk114
MQNYKITKTIRFKLEANPEQTEALLNQVEKSNQAFDLVFFTSQLENFANGMRDYLMFQKGKEPEKWQFRKNFTIKKDWLKVYAKEEFANIKQKQKEEQDSQYGKKSRRQPIQLNEGEKEIIQKSLNEVYAIYQELIQDVSKELNERARRERTGLLLKRLQERKNLPLLCDLADNISDKSETTHLIHDLIIQKEQLQKELLQGIAEFLPAQSSGLPIAKATFNYYTINKKPTDYAQKIEEQLKALRISDYSKKIQINAKSFLGNDNFKKVMEDIKNRLKKDNITHLLFGHVPSSISLGYEYASLRQILKNIKAEQKKKFNELMMEDDFTYEKLKKEQDLYLFTSITNGQFNDYLDKTRKLQDLANQLNNKSLSKEQKSALTSQKERVAKERGRLLRDEFTDWKKFMGIYRDVAQKHGKILATLKGIEKERIESQLLKYWALILKVNAQYKLVLIPRDKVQNAKKWIENHKNNKKTDTQELPQLYWFESLTFKSLQKLCWGHAETGNNEFRKNIISIIPKNKNNQPYTGEHEFEGKEQDKINFYKKVLQDKYTRDVLHLPFAQIDKEIISKNFDTLEDFKITLEKICYRRQVIINQDAEKTLTEQFKAQILNITSLDLSRKSNESAIKPHTQIWKNFWSDSNEKQDFDIRLNPEITITYREPKPSRVHKYGKNSQNYDEKMKNRYLYPQFILITTMSEHCNAPQKNLSFITEEELKKEIDTFNQKFREKNQIKFAIGLDNGETELSTLGIFVPDFNKNTNEERLAQLRKVQEYGFEALTIKNLNYAERDYKGKLRKMIDNPSYFLNKSLYIRTFGKTEQDYERMFAEQFEKKYLLSLDLSAAKVICGHIVTNGDTHALFNLWKRHAERLIYFANDHIKEETAKKVFIKTIKELTHAEKEKLAESISTEKYKKLTDEEKKKYSTWLFEDRNLHSFTKDEDEKFNKILKNKGNYALGTVFYVVYLDEKLIDVKSVFDIRLIFKKREEFYSISSEEEIMTQLNGYNTNRTSHDLSNQELDLKLKTYKETIVANAIGVIDFLYKQYKQRFGGEGLIVKEGFDTEKVVDSLEKFSGNIYRILERKLYQKFQNYGLVPPIKSLLSVRSEGVKDHDKTSILKLGNVGFVSQAGTSQECPVCLEGKLHHGEKCDKCGFIATMMHSNDGIAGYNIAKRGFNNFVSQLPVKQ

SEQ ID NO: 342 - DNA, 2487 bp, Unknown
  metagenome-derived sequence
  misc_feature (1)..(2487): Unk113 native DNA
atggactccagtcgtggtcgggaaattgcccgagctagttttaacttgaatgcaataaataaaattagtaaaaattttgatcaagagttttctaacttaaaaaaagaaaaggaagagatttttaattttacaaaaacagatacggatctttttaaaagagttgatttcaaagatctcgataaatccactcctgaagtttatagtctcttaaaagattttaaagctagagaaaaaagtcggtttttagaattaattagtcaaggaaaaataaaagatctaaaaagtggtaacattccacctttgtttaaagatataaaaataaataaatgggaaaaaaataccaacaaagaaatttttagctatgatatttttaaaaattttctaaacgaaaaagataaaaagaaaagaggaaagtattttaccattaggtttaataattatatagagattaacaatgtctttaaaagagtggcgattaaaaatggtgagttgaaagccaaagaacgctctattgaacaggaaaaaagagaagctttgcttttgcaatattgggctataattcttgaaagtgaaaatacaaaaagtttagttttaattcctaaagacaaggcacaaaaagccaatctcttcttaagagattttgaaagtttagaaaacggcaaagatactgttatcagttttagctctttaactttacgggctttagaaaaattaatccgtcgtaatttaggaaaagaagtcccgcttcttagtgatgaagatgaacaaaaagctatcattttatacaaaagagttttgcgaggcgattttccaatgctgaaaaatattggtattgatggttttgataatgatattgaaaagttattaaatcaagattttgccagcaaagaagattttagaattgctttagaaaaagtagcttatattactaaaagaataaaaattgatcactctactttagagagatttaaaaacaatttttctgtgattgtgagtgaaataaccgcctacgattggaagcgaaatatagctactgaaagaaaaaaagagcatactaaaatctgggaagaattttggggagataaaaatcaaaatggctttttcccaaatcgaatcaatcctgaagttcgtttgttttatcgtccaatacttaaacaagaagatcctaaaaaacaacaaaaccgtttttctaaagaacattttggcgtggcttttaccatttctcaaaatgctgctaaagaaagaatggttactactttttctgaagctaaagatctaaaagctgtagttgaaaagtttaatcaagaagagattttaaataactttgttaaaaaacaaggtgataatttatggtactttggaattgatcgaggtaacacagaactagcttcgctttgtgtagttaaattttctgatgaagattatgaagagtctttgcaaaacagggtagtggttcaaaaaaagccaattcctgctctcataaaagcttatcgaattagagatctaaaagcagaaagagaaattgtaattgataaagatcaaaacaccaaagtagtttctatttataaaaatccttcttattttattgatgaactggataaatattttgaagaggttaatagtccttgtatggatttaaccatggcaaaacttattaaaggaaaaataattcttgatggtgacaggcaaacttatttaaaattaaaaatgataaatggtaagcgtcagttgaaagaaaagtttggtagtattgatccgacagctcaaattgaattgcttgaaaataataaaaacaaaagtgatcgtaagtttagggtaaaatcaaaaactggggagcgttatccttatcaatttttaccattctttaccgcagaacatgaaaaaactataagcactgaagagtttcgtcttgagttgcaaaattatcttgataaattaagaaaaggggaaaaagaagatgaggagataagtatagaaaaaataaatcaccttcgtgattctcttaccagtaatatggttgggattattgcgcatttgtttgagcaattcccaggaattatcaacctagaaaaccttcataaagaaagagaaattgaaagtcatttttctagcaataacgagaacttagcccgtcgcttagaatggagtttgtataaaaaattccaaaaactaggtctcgtaccgccacaattaaaacaaactgtgatgttgcgaagagatgataagaaaaaagaggggaataaagatggtttaaatcagtttggaattattcattttattgaaacgaaaggtactagtgctaggtgtcctgtgtgtgaacatgaaaaatcaggagaagaaagaaaggaggaaaagtttagtcgccatacctatagctgtaaccaatgtggttttaccactgatgatccaaaagcgccgtttgagtttctgaaagattctgatgcaaccgctgcttttaacatcgctaagaagaaactaaattattaa

SEQ ID NO: 343 - DNA, 3543 bp, Unknown
  metagenome-derived sequence
  misc_feature (1)..(3543): Unk114 native DNA
atgcagaactacaaaatcaccaagaccattcgcttcaagttagaagctaatccagaacaaacagaagcactactcaatcaagtagaaaaatccaatcaagcgtttgaccttgtttttttcacctcccagctcgaaaacttcgctaatggcatgcgggactatctgatgtttcaaaaaggtaaagaacctgaaaaatggcaattccgaaaaaattttaccatcaaaaaagattggctgaaagtgtatgccaaagaggaattcgctaacataaagcaaaagcaaaaagaggaacaagattcacaatacggtaaaaagtcgcgcaggcaacccattcaactcaatgagggcgaaaaagaaataatccaaaagtcattaaacgaagtttacgctatctatcaagagcttattcaagatgtgagcaaagagcttaatgaacgcgctcgcagagaaagaacaggtttattgcttaaacgtttgcaggaaagaaaaaacttacccctactctgcgaccttgccgataacatcagcgataaaagtgaaaccacacaccttattcatgacttaatcatacaaaaagaacagctacaaaaggagttattgcaaggtattgcagagtttttacctgctcaatccagcggtctacctattgctaaagctacttttaactattacaccatcaacaaaaaacctacggattatgcgcaaaagattgaggaacaattaaaagcattacgtatatctgattattctaaaaaaatacaaatcaatgcgaagtcatttcttggcaatgataacttcaaaaaggtaatggaagatattaaaaaccgcctgaaaaaagacaatatcacgcatttactttttggtcatgttccttcaagtatttcacttgggtatgaatacgcaagcctgcgtcagatactcaaaaacatcaaagcagaacaaaaaaagaaattcaatgaattgatgatggaagatgattttacctatgaaaaactcaaaaaagaacaagatttgtacttatttacttccataaccaacggacaatttaacgattaccttgataaaacacgcaaactacaagaccttgcaaatcagttaaataacaaaagtctgtcaaaagaacaaaaatctgcactgacaagccaaaaagaaagagtagccaaggaacgtggtcgactattaagagatgaatttacagactggaagaaattcatgggaatctaccgtgatgtagcccaaaagcacggtaaaatacttgctacactcaaaggcattgaaaaagaaagaatagagtcacaattactcaaatactgggcattgatactcaaagtaaatgcacagtacaaacttgtgcttatccctcgtgataaagtacaaaatgctaaaaaatggatagaaaaccataaaaacaataaaaaaactgatacacaagagctaccccaactatattggtttgagagtttgactttcaaaagtctgcaaaaattatgttggggacacgcagaaacgggtaataatgaatttcgtaaaaatatcataagtattattccaaaaaataaaaataatcaaccatacacgggagaacatgaatttgaaggaaaagaacaagataaaataaacttctacaaaaaggttttgcaagataaatacacgcgtgatgtactgcatttaccctttgcacagatagataaagaaattatcagcaaaaactttgatactttagaagacttcaaaatcactttggaaaagatttgctaccgccgtcaggtaataatcaatcaagatgcagaaaaaaccttaactgagcaattcaaggcacaaattctcaatattacatcattagacctgtcccgtaagtctaatgagagtgcgatcaaaccgcatactcaaatttggaaaaatttttggtcggatagcaatgaaaaacaagattttgatattcgcttaaaccctgaaattaccatcacataccgcgaacctaaacccagcagagtgcataaatacggcaaaaattctcaaaactatgatgaaaaaatgaaaaatcgttatttgtatccacaatttattttgattactaccatgagcgaacactgtaacgcccctcaaaaaaatctttctttcatcactgaggaagaacttaaaaaggaaatcgatacctttaatcaaaaattcagagaaaaaaaccaaattaaatttgctatcggcttggataatggagaaacagaactctctacattaggtatctttgtacctgattttaacaaaaataccaacgaagagagattagctcaactccgaaaagtacaagaatacggttttgaagcacttactataaaaaacctcaattatgcagagagagattacaagggcaaactcagaaaaatgattgacaatccttcttatttcttgaacaaatctctgtatataagaacgttcggaaaaacagaacaggattatgaacgcatgtttgcagagcaatttgagaaaaaatacttactttctctggatttatccgctgctaaagtaatatgcggacatattgtaactaatggagatacccatgctttatttaacctgtggaagcgccacgccgaaagattgatttattttgctaatgaccacataaaagaagaaaccgctaaaaaagtattcattaaaaccataaaagaactaactcatgccgaaaaggaaaaactagcagagtctatctctacagaaaagtataaaaaactcaccgacgaagagaaaaaaaaatactctacttggctgtttgaggatagaaacctacactcatttaccaaagatgaggatgaaaaatttaataaaatcctaaaaaataaaggtaattacgcattaggaacagtattttacgttgtctatctcgacgagaaactcattgacgtaaaaagcgtatttgatatccgcttgatattcaaaaaacgagaggaattttactctatttcctccgaagaggagattatgacacaactgaacgggtacaatactaaccgcacctcacacgacctctccaaccaagaattagaccttaaacttaaaacttacaaagaaactattgtagctaatgctatcggcgttattgactttttatacaaacaatacaaacaacgctttggtggtgaaggtttgattgtcaaagaaggttttgatacagaaaaagtggtagatagtttggaaaagtttagcggaaatatctatcgcatattggagcgtaagttgtaccaaaaattccaaaactatggattagtacctcctattaagtctttgctttctgtgcgaagtgagggagtaaaagatcatgataaaaccagtattcttaaacttggtaatgtgggttttgtcagtcaggcaggtaccagtcaggaatgccccgtgtgtttagaaggtaaattacaccacggtgaaaaatgcgataaatgtgggtttatagctactatgatgcactctaatgatggtattgcaggctataacattgctaaacgtgggtttaataattttgtatcccaattacctgttaaacaatga

SEQ ID NO: 344 - DNA, 60 bp, artificial
  synthetic guide RNA
  misc_feature (1)..(60): guide RNA
  misc_feature (37)..(60): targeting region
gtctaaaccgacccaataatttctactgttgtagattggagcaacacctgaaggaaggct

SEQ ID NO: 345 - DNA, 35 bp, artificial
  synthetic
  misc_feature (1)..(35): promoter for gRNA expression
ttgacagctagctcagtcctaggtataatgctagc

SEQ ID NO: 346 - DNA, 4326 bp, artificial
  synthetic vector
  misc_feature (1)..(4326): pOD789
  misc_feature (2802)..(2825): target sequence
gccttcaacccagtcagctccttccggtgggcgcggggcatgactaaacttcaaaattagacacaacattgaagatggaagcgttcaactagcagaccattatcaacaaaatactccaattggcgatggccctgtccttttaccagacaaccattacctgtccacacaatctgccctttcgaaagatcccaacgaaaagagagaccacatggtccttcttgagtttgtaacagctgctgggattacacatggcatggatgaactatacaaataaatgtccagactgcaggcatgcaagctctagaggcatcaaataaaacgaaaggctcagtcgaaagactgggcctttcgttttatctgttgtttgtcggtgaacgctctcctgagtaggacaaatccgccgccctagacctagggtacgggttttgctgcccgcaaacgggctgttctggtgttgctagtttgttatcagaatcgcagatccggcttcaggtttgccggctgaaagcgctatttcttccagaattgccatgattttttccccacgggaggcgtcactggctcccgtgttgtcggcagctttgattcgataagcagcatcgcctgtttcaggctgtctatgtgtgactgttgagctgtaacaagttgtctcaggtgttcaatttcatgttctagttgctttgttttactggtttcacctgttctattaggtgttacatgctgttcatctgttacattgtcgatctgttcatggtgaacagctttaaatgcaccaaaaactcgtaaaagctctgatgtatctatcttttttacaccgttttcatctgtgcatatggacagttttccctttgatatctaacggtgaacagttgttctacttttgtttgttagtcttgatgcttcactgatagatacaagagccataagaacctcagatccttccgtatttagccagtatgttctctagtgtggttcgttgtttttgcgtgagccatgagaacgaaccattgagatcatgcttactttgcatgtcactcaaaaattttgcctcaaaactggtgagctgaatttttgcagttaaagcatcgtgtagtgtttttcttagtccgttacgtaggtaggaatctgatgtaatggttgttggtattttgtcaccattcatttttatctggttgttctcaagttcggttacgagatccatttgtctatctagttcaacttggaaaatcaacgtatcagtcgggcggcctcgcttatcaaccaccaatttcatattgctgtaagtgtttaaatctttacttattggtttcaaaacccattggttaagccttttaaactcatggtagttattttcaagcattaacatgaacttaaattcatcaaggctaatctctatatttgccttgtgagttttcttttgtgttagttcttttaataaccactcataaatcctcatagagtatttgttttcaaaagacttaacatgttccagattatattttatgaatttttttaactggaaaagataaggcaatatctcttcactaaaaactaattctaatttttcgcttgagaacttggcatagtttgtccactggaaaatctcaaagcctttaaccaaaggattcctgatttccacagttctcgtcatcagctctctggttgctttagctaatacaccataagcattttccctactgatgttcatcatctgagcgtattggttataagtgaacgataccgtccgttctttccttgtagggttttcaatcgtggggttgagtagtgccacacagcataaaattagcttggtttcatgctccgttaagtcatagcgactaatcgctagttcatttgctttgaaaacaactaattcagacatacatctcaattggtctaggtgattttaatcactataccaattgagatgggctagtcaatgataattactagtccttttcctttgagttgtgggtatctgtaaattctgctagacctttgctggaaaacttgtaaattctgctagaccctctgtaaattccgctagacctttgtgtgttttttttgtttatattcaagtggttataatttatagaataaagaaagaataaaaaaagataaaaagaatagatcccagccctgtgtataactcactactttagtcagttccgcagtattacaaaaggatgtcgcaaacgctgtttgctcctctacaaaacagaccttaaaaccctaaaggcttaagtagcaccctcgcaagctcgggcaaatcgctgaatattccttttgtctccgaccatcaggcacctgagtcgctgtctttttcgtgacattcagttcgctgcgctcacggctctggcagtgaatgggggtaaatggcactacaggcgccttttatggattcatgcaaggaaactacccataatacaagaaaagcccgtcacgggcttctcagggcgttttatggcgggtctgctatgtggtgctatctgactttttgctgttcagcagttcctgccctctgattttccagtctgaccacttcggattatcccgtgacaggtcattcagactggctaatgcacccagtaaggcagcggtatcatcaacaggcttacccgtcttactgtccctagtgcttggattctcaccaataaaaaacgcccggcggcaaccgagcgttctgaacaaatccagatggagttctgaggtcattactggatctatcaacaggagtccaagcgagctctcgaaccccagagtcccgcgagagcatcgatcctagcatggatgcattagattggagcaacacctgaaggaaggctagcaagtgcggcagcaaagacagcgatgccttgacagctagctcagtcctaggtataatgctagcgtctaaaccgacccaataatttctactgttgtagattggagcaacacctgaaggaaggctccctcgagtctggtaaagaaaccgctgctgcgaaatttgaacgccagcacatggactcgtctactagcgcagcttaattaacctaggctgctgccaccgctgagcaataaccggcttatcggtcagtttcacctgatttacgtaaaaacccgcttcggcgggtttttgcttttggaggggcagaaagatgaatgactgtccacgacgctatacccaaaagaaaaagcttgaaagaatcgatcgatcccgaatgagtagtacagcggccgcgattatcaaaaaggatcttcacctagatccttttaaattaaaaatgaagttttaaatcaatctaaagtatatatgagtaaacttggtctgacagttaccaatgcttaatcagtgaggcacctatctcagcgatctgtctatttcgttcatccatagttgcctgactccccgtcgtgtagataactacgatacgggagggcttaccatctggccccagtgctgcaatgataccgcgggacccacgctcaccggctccagatttatcagcaataaaccagccagccggaagggccgagcgcagaagtggtcctgcaactttatccgcctccatccagtctattaattgttgccgggaagctagagtaagtagttcgccagttaatagtttgcgcaacgttgttgccattgctacaggcatcgtggtgtcacgctcgtcgtttggtatggcttcattcagctccggttcccaacgatcaaggcgagttacatgatcccccatgttgtgcaaaaaagcggttagctccttcggtcctccgatcgttgtcagaagtaagttggccgcagtgttatcactcatggttatggcagcactgcataattctcttactgtcatgccatccgtaagatgcttttctgtgactggtgagtactcaaccaagtcattctgagaatagtgtatgcggcgaccgagttgctcttgcccggcgtcaatacgggataataccgcgccacatagcagaactttaaaagtgctcatcattggaaaacgttcttcggggcgaaaactctcaaggatcttaccgctgttgagatccagttcgatgtaacccactcgtgcacccaactgatcttcagcatcttttactttcaccagcgtttctgggtgagcaaaaacaggaaggcaaaatgccgcaaaaaagggaataagggcgacacggaaatgttgaatactcatactcttcctttttcaatattattgaagcatttatcagggttattgtctcatgagcggatacatatttgaatgtatttagaaaaataaacaaataggggttccgcgcacatttccccgaaaagtgccacctggtcgaccgatgcccttgaga

SEQ ID NO: 347 - DNA, 4326 bp, artificial
  synthetic vector
  misc_feature (1)..(4326): pOD821
  misc_feature (2802)..(2825): target sequence
gccttcaacccagtcagctccttccggtgggcgcggggcatgactaaacttcaaaattagacacaacattgaagatggaagcgttcaactagcagaccattatcaacaaaatactccaattggcgatggccctgtccttttaccagacaaccattacctgtccacacaatctgccctttcgaaagatcccaacgaaaagagagaccacatggtccttcttgagtttgtaacagctgctgggattacacatggcatggatgaactatacaaataaatgtccagactgcaggcatgcaagctctagaggcatcaaataaaacgaaaggctcagtcgaaagactgggcctttcgttttatctgttgtttgtcggtgaacgctctcctgagtaggacaaatccgccgccctagacctagggtacgggttttgctgcccgcaaacgggctgttctggtgttgctagtttgttatcagaatcgcagatccggcttcaggtttgccggctgaaagcgctatttcttccagaattgccatgattttttccccacgggaggcgtcactggctcccgtgttgtcggcagctttgattcgataagcagcatcgcctgtttcaggctgtctatgtgtgactgttgagctgtaacaagttgtctcaggtgttcaatttcatgttctagttgctttgttttactggtttcacctgttctattaggtgttacatgctgttcatctgttacattgtcgatctgttcatggtgaacagctttaaatgcaccaaaaactcgtaaaagctctgatgtatctatcttttttacaccgttttcatctgtgcatatggacagttttccctttgatatctaacggtgaacagttgttctacttttgtttgttagtcttgatgcttcactgatagatacaagagccataagaacctcagatccttccgtatttagccagtatgttctctagtgtggttcgttgtttttgcgtgagccatgagaacgaaccattgagatcatgcttactttgcatgtcactcaaaaattttgcctcaaaactggtgagctgaatttttgcagttaaagcatcgtgtagtgtttttcttagtccgttacgtaggtaggaatctgatgtaatggttgttggtattttgtcaccattcatttttatctggttgttctcaagttcggttacgagatccatttgtctatctagttcaacttggaaaatcaacgtatcagtcgggcggcctcgcttatcaaccaccaatttcatattgctgtaagtgtttaaatctttacttattggtttcaaaacccattggttaagccttttaaactcatggtagttattttcaagcattaacatgaacttaaattcatcaaggctaatctctatatttgccttgtgagttttcttttgtgttagttcttttaataaccactcataaatcctcatagagtatttgttttcaaaagacttaacatgttccagattatattttatgaatttttttaactggaaaagataaggcaatatctcttcactaaaaactaattctaatttttcgcttgagaacttggcatagtttgtccactggaaaatctcaaagcctttaaccaaaggattcctgatttccacagttctcgtcatcagctctctggttgctttagctaatacaccataagcattttccctactgatgttcatcatctgagcgtattggttataagtgaacgataccgtccgttctttccttgtagggttttcaatcgtggggttgagtagtgccacacagcataaaattagcttggtttcatgctccgttaagtcatagcgactaatcgctagttcatttgctttgaaaacaactaattcagacatacatctcaattggtctaggtgattttaatcactataccaattgagatgggctagtcaatgataattactagtccttttcctttgagttgtgggtatctgtaaattctgctagacctttgctggaaaacttgtaaattctgctagaccctctgtaaattccgctagacctttgtgtgttttttttgtttatattcaagtggttataatttatagaataaagaaagaataaaaaaagataaaaagaatagatcccagccctgtgtataactcactactttagtcagttccgcagtattacaaaaggatgtcgcaaacgctgtttgctcctctacaaaacagaccttaaaaccctaaaggcttaagtagcaccctcgcaagctcgggcaaatcgctgaatattccttttgtctccgaccatcaggcacctgagtcgctgtctttttcgtgacattcagttcgctgcgctcacggctctggcagtgaatgggggtaaatggcactacaggcgccttttatggattcatgcaaggaaactacccataatacaagaaaagcccgtcacgggcttctcagggcgttttatggcgggtctgctatgtggtgctatctgactttttgctgttcagcagttcctgccctctgattttccagtctgaccacttcggattatcccgtgacaggtcattcagactggctaatgcacccagtaaggcagcggtatcatcaacaggcttacccgtcttactgtccctagtgcttggattctcaccaataaaaaacgcccggcggcaaccgagcgttctgaacaaatccagatggagttctgaggtcattactggatctatcaacaggagtccaagcgagctctcgaaccccagagtcccgcgagagcatcgatcctagcatggatgcatacttatggagcaacacctgaaggaaggctagcaagtgcggcagcaaagacagcgatgccttgacagctagctcagtcctaggtataatgctagcgtctaaaccgacccaataatttctactgttgtagattggagcaacacctgaaggaaggctccctcgagtctggtaaagaaaccgctgctgcgaaatttgaacgccagcacatggactcgtctactagcgcagcttaattaacctaggctgctgccaccgctgagcaataaccggcttatcggtcagtttcacctgatttacgtaaaaacccgcttcggcgggtttttgcttttggaggggcagaaagatgaatgactgtccacgacgctatacccaaaagaaaaagcttgaaagaatcgatcgatcccgaatgagtagtacagcggccgcgattatcaaaaaggatcttcacctagatccttttaaattaaaaatgaagttttaaatcaatctaaagtatatatgagtaaacttggtctgacagttaccaatgcttaatcagtgaggcacctatctcagcgatctgtctatttcgttcatccatagttgcctgactccccgtcgtgtagataactacgatacgggagggcttaccatctggccccagtgctgcaatgataccgcgggacccacgctcaccggctccagatttatcagcaataaaccagccagccggaagggccgagcgcagaagtggtcctgcaactttatccgcctccatccagtctattaattgttgccgggaagctagagtaagtagttcgccagttaatagtttgcgcaacgttgttgccattgctacaggcatcgtggtgtcacgctcgtcgtttggtatggcttcattcagctccggttcccaacgatcaaggcgagttacatgatcccccatgttgtgcaaaaaagcggttagctccttcggtcctccgatcgttgtcagaagtaagttggccgcagtgttatcactcatggttatggcagcactgcataattctcttactgtcatgccatccgtaagatgcttttctgtgactggtgagtactcaaccaagtcattctgagaatagtgtatgcggcgaccgagttgctcttgcccggcgtcaatacgggataataccgcgccacatagcagaactttaaaagtgctcatcattggaaaacgttcttcggggcgaaaactctcaaggatcttaccgctgttgagatccagttcgatgtaacccactcgtgcacccaactgatcttcagcatcttttactttcaccagcgtttctgggtgagcaaaaacaggaaggcaaaatgccgcaaaaaagggaataagggcgacacggaaatgttgaatactcatactcttcctttttcaatattattgaagcatttatcagggttattgtctcatgagcggatacatatttgaatgtatttagaaaaataaacaaataggggttccgcgcacatttccccgaaaagtgccacctggtcgaccgatgcccttgaga

SEQ ID NO: 348 - DNA, 3699 bp, artificial
  synthetic sequence
  misc_feature (1)..(3699): SuCms1 ORF
atgcttcacgctttcactaatcagtatcaactttctaaaacattgagattcggagcaactctgaaagaagacgagaaaaaatgcaagagtcatgaggaacttaaaggatttgtagatatttcatatgaaaacatgaaatcttccgctacaatcgctgaaagtttgaacgaaaatgaacttgtgaaaaaatgcgaaaggtgttattctgagatcgtgaaatttcataacgcttgggagaaaatctactacaggacagatcaaattgctgtctataaagatttctataggcaactgtcaagaaaagctagatttgatgccggtaagcaaaattcacaactgataaccttagcttccctttgcggtatgtaccaaggagctaagttaagtagatacataaccaattattggaaagataacattactaggcagaaatcatttcttaaagatttttcccaacagttacatcaatacactcgtgcactggaaaagtctgataaggctcatacaaaacctaatctgatcaacttcaataagacctttatggtgttggccaatctcgtgaacgaaatagttattcctctttctaatggagccatctcttttccaaacatctctaagctggaggacggggaagagtcccatcttatagaatttgcactcaatgactattctcagttgtctgaattaattggtgaattgaaggatgcaatagccactaacggtggttacacaccatttgcaaaggtgacccttaatcattatacagcagaacagaaaccacacgtatttaaaaatgatattgatgctaaaatacgtgagcttaagttgattgggttggttgagaccttgaaaggaaaatccagtgaacagattgaggaatacttctcaaatttagacaagtttagcacatacaacgataggaaccaatcagtaatcgtaagaactcaatgctttaagtataaacccattccttttttggttaagcatcaacttgcaaagtacatttcagaaccaaacggttgggatgaagacgccgtagctaaggttctggatgctgttggagctattcgttctccagcacatgattacgctaataaccaagaggggtttgatttaaaccattatcctattaaagtcgctttcgattatgcttgggagcagttggctaattctttgtataccaccgtgacttttccccaagaaatgtgcgaaaaatatttaaatagtatctacggttgtgaagtctccaaggagcctgtatttaaattctatgctgatctgctttatatcaggaagaatctggctgtactcgaacataagaacaatctgcccagtaatcaggaagagttcatatgtaagatcaacaacacatttgagaacatcgtgttaccatataagatttctcaatttgaaacttataagaaggatatacttgcctggataaacgatgggcatgaccataaaaaatatactgatgcaaaacagcaattaggttttattaggggtggactcaagggtaggattaaggcagaagaagtgtcccagaaagacaaatatggaaaaatcaagtcttattatgagaacccttacactaaactcaccaacgaatttaagcaaatatcctctacttatgggaagaccttcgctgagttaagagacaaatttaaagagaagaatgagatcaccaaaattacccacttcggtattataatagaagataaaaacagagacagatatttacttgcaagcgagttgaagcacgaacaaatcaaccacgtcagtactatccttaacaagttagataaatcatctgaatttattacctatcaagttaagagccttacaagcaaaacattgattaaattgattaaaaatcacaccacaaagaagggagccatttcaccatatgctgattttcacaccagtaaaaccggattcaacaagaatgaaatcgaaaagaattgggataattataagagagaacaggtattggttgagtatgtcaaagattgtctgaccgatagtactatggcaaaaaaccagaactgggcagagttcggttggaattttgagaaatgcaactcctatgaggatatcgaacacgaaatcgaccaaaaatcatatttgctgcagagcgatacaattagcaagcagagtattgcttccctcgtggaggggggctgtcttctccttcctataattaaccaagatataacaagcaaggagaggaaggataaaaatcaattttcaaaagattggaaccatattttcgaaggttccaaagaattccgtctccacccagagttcgcagttagctacaggacacctattgaagggtatccggtacagaagaggtacgggcgtctgcagttcgtttgcgcttttaatgcacacatcgttccacaaaatggtgagttcatcaatttgaaaaagcagatcgagaactttaacgatgaagacgttcagaaacgtaatgtgactgaattcaataaaaaggtgaatcatgcactttccgacaaagaatacgtcgttattggtattgatagaggcctcaaacagcttgccacactctgtgttttagacaaaagaggtaaaattcttggagattttgagatctacaaaaaggaatttgtgcgtgctgaaaaaagaagcgagagtcattgggaacacacacaagcagaaaccagacatatcttggatctttccaatttgcgtgtggagacaacaatagagggtaaaaaggttctcgtggaccagagcctcacacttgtgaaaaagaatcgtgatacaccagatgaggaagctactgaagaaaataaacagaaaatcaagttgaagcagctcagctatattagaaaattgcagcataagatgcagactaacgaacaggacgttttagatttaattaataatgaaccatcagatgaagaatttaagaaaagaatcgaggggcttatttccagttttggagaaggacagaagtacgctgaccttccaattaatactatgagagaaatgatctctgatctccagggagttatcgctagaggaaacaaccaaacagagaaaaataaaattattgaattagatgctgcagacaaccttaaacaaggtattgtagctaacatgatcggaattgttaattacatcttcgctaagtattcatacaaggcttacatctctcttgaggatttgtcaagagcctatggaggtgcaaagtccggttatgacggaaggtatctgccatcaacttcacaagacgaggatgtagatttcaaggaacagcagaatcagatgcttgcaggtttgggtacctaccaattcttcgagatgcagcttctgaaaaaacttcaaaagattcagagtgataacaccgttctgagattcgtgcccgctttcagatctgcagataactatagaaatattttgagacttgaggaaactaaatataagtctaagccgttcggcgttgttcatttcatagatccaaagtttacatcaaagaaatgccccgtctgtagcaaaacaaatgtatacagggacaaggatgacatcttggtttgcaaagagtgcggttttaggagcgactcccaattaaaagaaagagagaataacattcattatattcacaacggggacgataacggtgcataccacatcgcccttaagagcgttgagaatcttattcagatgaagtaa

SEQ ID NO: 349 - protein, 1228 aa, Lachnospiraceae bacterium ND2006
  MISC_FEATURE (1)..(1228): LbCpf1
MSKLEKFTNCYSLSKTLRFKAIPVGKTQENIDNKRLLVEDEKRAEDYKGVKKLLDRYYLSFINDVLHSIKLKNLNNYISLFRKKTRTEKENKELENLEINLRKEIAKAFKGNEGYKSLFKKDIIETILPEFLDDKDEIALVNSFNGFTTAFTGFFDNRENMFSEEAKSTSIAFRCINENLTRYISNMDIFEKVDAIFDKHEVQEIKEKILNSDYDVEDFFEGEFFNFVLTQEGIDVYNAIIGGFVTESGEKIKGLNEYINLYNQKTKQKLPKFKPLYKQVLSDRESLSFYGEGYTSDEEVLEVFRNTLNKNSEIFSSIKKLEKLFKNFDEYSSAGIFVKNGPAISTISKDIFGEWNVIRDKWNAEYDDIHLKKKAVVTEKYEDDRRKSFKKIGSFSLEQLQEYADADLSVVEKLKEIIIQKVDEIYKVYGSSEKLFDADFVLEKSLKKNDAVVAIMKDLLDSVKSFENYIKAFFGEGKETNRDESFYGDFVLAYDILLKVDHIYDAIRNYVTQKPYSKDKFKLYFQNPQFMGGWDKDKETDYRATILRYGSKYYLAIMDKKYAKCLQKIDKDDVNGNYEKINYKLLPGPNKMLPKVFFSKKWMAYYNPSEDIQKIYKNGTFKKGDMFNLNDCHKLIDFFKDSISRYPKWSNAYDFNFSETEKYKDIAGFYREVEEQGYKVSFESASKKEVDKLVEEGKLYMFQIYNKDFSDKSHGTPNLHTMYFKLLFDENNHGQIRLSGGAELFMRRASLKKEELVVHPANSPIANKNPDNPKKTTTLSYDVYKDKRFSEDQYELHIPIAINKCPKNIFKINTEVRVLLKHDDNPYVIGIDRGERNLLYIVVVDGKGNIVEQYSLNEIINNFNGIRIKTDYHSLLDKKEKERFEARQNWTSIENIKELKAGYISQVVHKICELVEKYDAVIALEDLNSGFKNSRVKVEKQVYQKFEKMLIDKLNYMVDKKSNPCATGGALKGYQITNKFESFKSMSTQNGFIFYIPAWLTSKIDPSTGFVNLLKTKYTSIADSKKFISSFDRIMYVPEEDLFEFALDYKNFSRTDADYIKKWKLYSYGNRIRIFRNPKKNNVFDWEEVCLTSAYKELFNKYGINYQQGDIRALLCEQSDKAFYSSFMALMSLMLQMRNSITGRTDVDFLISPVKNSDGIFYDSRNYEAQENAILPKNADANGAYNIARKVLWAIGQFKKAEDEKLDKVKIAISNKEWLEYAQTSVKH

SEQ ID NO: 350 - DNA, 3687 bp, Lachnospiraceae bacterium ND2006
  misc_feature (1)..(3687): LbCpf1
atgagcaaactggaaaaatttacgaattgttatagcctgtccaagaccctgcgtttcaaagccatccccgttggcaaaacccaggagaatattgataataaacgtctgctggttgaggatgaaaaaagagcagaagactataagggagtcaaaaaactgctggatcggtactacctgagctttataaatgacgtgctgcatagcattaaactgaaaaatctgaataactatattagtctgttccgcaagaaaacccgaacagagaaagaaaataaagagctggaaaacctggagatcaatctgcgtaaagagatcgcaaaagcttttaaaggaaatgaaggttataaaagcctgttcaaaaaagacattattgaaaccatcctgccggaatttctggatgataaagacgagatagcgctcgtgaacagcttcaacgggttcacgaccgccttcacgggctttttcgataacagggaaaatatgttttcagaggaagccaaaagcacctcgatagcgttccgttgcattaatgaaaatttgacaagatatatcagcaacatggatattttcgagaaagttgatgcgatctttgacaaacatgaagtgcaggagattaaggaaaaaattctgaacagcgattatgatgttgaggattttttcgagggggaattttttaactttgtactgacacaggaaggtatagatgtgtataatgctattatcggcgggttcgttaccgaatccggcgagaaaattaagggtctgaatgagtacatcaatctgtataaccaaaagaccaaacagaaactgccaaaattcaaaccgctgtacaagcaagtcctgagcgatcgggaaagcttgagcttttacggtgaaggttataccagcgacgaggaggtactggaggtctttcgcaataccctgaacaagaacagcgaaattttcagctccattaaaaagctggagaaactgtttaagaattttgacgagtacagcagcgcaggtatttttgtgaagaacggacctgccataagcaccattagcaaggatatttttggagagtggaatgttatccgtgataaatggaacgcggaatatgatgacatacacctgaaaaagaaggctgtggtaactgagaaatatgaagacgatcgccgcaaaagctttaaaaaaatcggcagctttagcctggagcagctgcaggaatatgcggacgccgacctgagcgtggtcgagaaactgaaggaaattattatccaaaaagtggatgagatttacaaggtatatggtagcagcgaaaaactgtttgatgcggacttcgttctggaaaaaagcctgaaaaaaaatgatgctgttgttgcgatcatgaaagacctgctcgatagcgttaagagctttgaaaattacattaaagcattctttggcgagggcaaagaaacaaacagagacgaaagcttttatggcgacttcgtcctggcttatgacatcctgttgaaggtagatcatatatatgatgcaattcgtaattacgtaacccaaaagccgtacagcaaagataagttcaaactgtatttccagaacccgcagtttatgggtggctgggacaaagacaaggagacagactatcgcgccactattctgcgttacggcagcaagtactatctcgccatcatggacaaaaaatatgcaaagtgtctgcagaaaatcgataaagacgacgtgaacggaaattacgaaaagattaattataagctgctgccagggcccaacaagatgttaccgaaagtatttttttccaaaaaatggatggcatactataacccgagcgaggatatacagaagatttacaaaaatgggaccttcaaaaagggggatatgttcaatctgaatgactgccacaaactgatcgatttttttaaagatagcatcagccgttatcctaaatggtcaaacgcgtatgattttaatttctccgaaacggagaaatataaagacattgctggtttctatcgcgaagtcgaagaacagggttataaagttagctttgaatcggccagcaagaaagaggttgataaactggtggaggagggtaagctgtatatgtttcagatttataacaaagactttagcgacaaaagccacggtactcctaatctgcatacgatgtactttaaactgctgtttgatgagaataaccacggccaaatccgtctctccggtggagcagaactttttatgcggcgtgcgagcctaaaaaaggaagaactggtggtgcatcccgccaacagcccgattgctaacaaaaatccagataatcctaagaagaccaccacactgtcgtacgatgtctataaggataaacgtttctcggaagaccagtatgaattgcatataccgatagcaattaataaatgcccaaaaaacattttcaaaatcaacactgaagttcgtgtgctgctgaaacatgatgataatccgtatgtgatcggaattgaccgtggggagagaaatctgctgtatattgtagtcgttgatggcaagggcaacatcgttgagcagtatagcctgaatgaaataattaataattttaacggtatacgtattaaaaccgactatcatagcctgctggataaaaaggagaaagagcgttttgaggcacgccaaaattggacgagcatcgaaaacatcaaggaactgaaggcaggatatatcagccaagtagtccataaaatctgtgaactggtggagaagtacgacgctgtcattgccctggaagacctcaatagcggctttaaaaacagccgggtgaaggtggagaaacaggtataccaaaagtttgaaaagatgctcattgataagctgaactatatggttgataaaaagagcaacccgtgcgccactggcggtgcactgaaagggtaccaaattaccaataaatttgaaagctttaaaagcatgagcacgcagaatgggtttattttttatataccagcatggctgacgagcaagattgaccccagcactggttttgtcaatctgctgaaaaccaaatacacaagcattgcggatagcaaaaaatttatttcgagcttcgaccgtattatgtatgttccggaggaagatctgtttgaatttgccctggattataaaaacttcagccgcaccgatgcagattatatcaaaaaatggaagctgtacagttatggtaatcgtatacgtatcttccgtaatccgaagaaaaacaatgtgttcgattgggaagaggtctgtctgaccagcgcgtataaagaactgttcaacaagtacggaataaattatcagcaaggtgacattcgcgcactgctgtgtgaacagtcagataaagcattttatagcagctttatggcgctgatgagcctgatgctccagatgcgcaacagcataaccggtcgcacagatgttgactttctgatcagccctgtgaagaatagcgacggcatcttctacgattccaggaactatgaagcacaggaaaacgctattctgcctaaaaatgccgatgccaacggcgcctataatattgcacggaaggttctgtgggcgattggacagttcaagaaagcggaagatgagaagctggataaggtaaaaattgctattagcaataaggaatggctggagtacgcacagacatcggttaaacactga

SEQ ID NO: 351 - DNA, 35 bp, artificial
  synthetic promoter
  misc_feature (1)..(35): PJ23105 promoter
tttacggctagctcagtcctaggtactatgctagc

SEQ ID NO: 352 - DNA, 6870 bp, artificial
  synthetic plasmid vector
  misc_feature (1)..(6870): pOD786
atcgatgcataatgtgcctgtcaaatggacgaagcagggattctgcaaaccctatgctactccgtcaagccgtcaattgtctgattcgttaccaatttacggctagctcagtcctaggtactatgctagcggatcctctagatttaagaaggagatatacatatgcttcacgctttcactaatcagtatcaactttctaaaacattgagattcggagcaactctgaaagaagacgagaaaaaatgcaagagtcatgaggaacttaaaggatttgtagatatttcatatgaaaacatgaaatcttccgctacaatcgctgaaagtttgaacgaaaatgaacttgtgaaaaaatgcgaaaggtgttattctgagatcgtgaaatttcataacgcttgggagaaaatctactacaggacagatcaaattgctgtctataaagatttctataggcaactgtcaagaaaagctagatttgatgccggtaagcaaaattcacaactgataaccttagcttccctttgcggtatgtaccaaggagctaagttaagtagatacataaccaattattggaaagataacattactaggcagaaatcatttcttaaagatttttcccaacagttacatcaatacactcgtgcactggaaaagtctgataaggctcatacaaaacctaatctgatcaacttcaataagacctttatggtgttggccaatctcgtgaacgaaatagttattcctctttctaatggagccatctcttttccaaacatctctaagctggaggacggggaagagtcccatcttatagaatttgcactcaatgactattctcagttgtctgaattaattggtgaattgaaggatgcaatagccactaacggtggttacacaccatttgcaaaggtgacccttaatcattatacagcagaacagaaaccacacgtatttaaaaatgatattgatgctaaaatacgtgagcttaagttgattgggttggttgagaccttgaaaggaaaatccagtgaacagattgaggaatacttctcaaatttagacaagtttagcacatacaacgataggaaccaatcagtaatcgtaagaactcaatgctttaagtataaacccattccttttttggttaagcatcaacttgcaaagtacatttcagaaccaaacggttgggatgaagacgccgtagctaaggttctggatgctgttggagctattcgttctccagcacatgattacgctaataaccaagaggggtttgatttaaaccattatcctattaaagtcgctttcgattatgcttgggagcagttggctaattctttgtataccaccgtgacttttccccaagaaatgtgcgaaaaatatttaaatagtatctacggttgtgaagtctccaaggagcctgtatttaaattctatgctgatctgctttatatcaggaagaatctggctgtactcgaacataagaacaatctgcccagtaatcaggaagagttcatatgtaagatcaacaacacatttgagaacatcgtgttaccatataagatttctcaatttgaaacttataagaaggatatacttgcctggataaacgatgggcatgaccataaaaaatatactgatgcaaaacagcaattaggttttattaggggtggactcaagggtaggattaaggcagaagaagtgtcccagaaagacaaatatggaaaaatcaagtcttattatgagaacccttacactaaactcaccaacgaatttaagcaaatatcctctacttatgggaagaccttcgctgagttaagagacaaatttaaagagaagaatgagatcaccaaaattacccacttcggtattataatagaagataaaaacagagacagatatttacttgcaagcgagttgaagcacgaacaaatcaaccacgtcagtactatccttaacaagttagataaatcatctgaatttattacctatcaagttaagagccttacaagcaaaacattgattaaattgattaaaaatcacaccacaaagaagggagccatttcaccatatgctgattttcacaccagtaaaaccggattcaacaagaatgaaatcgaaaagaattgggataattataagagagaacaggtattggttgagtatgtcaaagattgtctgaccgatagtactatggcaaaaaaccagaactgggcagagttcggttggaattttgagaaatgcaactcctatgaggatatcgaacacgaaatcgaccaaaaatcatatttgctgcagagcgatacaattagcaagcagagtattgcttccctcgtggaggggggctgtcttctccttcctataattaaccaagatataacaagcaaggagaggaaggataaaaatcaattttcaaaagattggaaccatattttcgaaggttccaaagaattccgtctccacccagagttcgcagttagctacaggacacctattgaagggtatccggtacagaagaggtacgggcgtctgcagttcgtttgcgcttttaatgcacacatcgttccacaaaatggtgagttcatcaatttgaaaaagcagatcgagaactttaacgatgaagacgttcagaaacgtaatgtgactgaattcaataaaaaggtgaatcatgcactttccgacaaagaatacgtcgttattggtattgatagaggcctcaaacagcttgccacactctgtgttttagacaaaagaggtaaaattcttggagattttgagatctacaaaaaggaatttgtgcgtgctgaaaaaagaagcgagagtcattgggaacacacacaagcagaaaccagacatatcttggatctttccaatttgcgtgtggagacaacaatagagggtaaaaaggttctcgtggaccagagcctcacacttgtgaaaaagaatcgtgatacaccagatgaggaagctactgaagaaaataaacagaaaatcaagttgaagcagctcagctatattagaaaattgcagcataagatgcagactaacgaacaggacgttttagatttaattaataatgaaccatcagatgaagaatttaagaaaagaatcgaggggcttatttccagttttggagaaggacagaagtacgctgaccttccaattaatactatgagagaaatgatctctgatctccagggagttatcgctagaggaaacaaccaaacagagaaaaataaaattattgaattagatgctgcagacaaccttaaacaaggtattgtagctaacatgatcggaattgttaattacatcttcgctaagtattcatacaaggcttacatctctcttgaggatttgtcaagagcctatggaggtgcaaagtccggttatgacggaaggtatctgccatcaacttcacaagacgaggatgtagatttcaaggaacagcagaatcagatgcttgcaggtttgggtacctaccaattcttcgagatgcagcttctgaaaaaacttcaaaagattcagagtgataacaccgttctgagattcgtgcccgctttcagatctgcagataactatagaaatattttgagacttgaggaaactaaatataagtctaagccgttcggcgttgttcatttcatagatccaaagtttacatcaaagaaatgccccgtctgtagcaaaacaaatgtatacagggacaaggatgacatcttggtttgcaaagagtgcggttttaggagcgactcccaattaaaagaaagagagaataacattcattatattcacaacggggacgataacggtgcataccacatcgcccttaagagcgttgagaatcttattcagatgaagtaatgacccgggaagcttggctgttttggcggatgagagaagattttcagcctgatacagattaaatcagaacgcagaagcggtctgataaaacagaatttgcctggcggcagtagcgcggtggtcccacctgaccccatgccgaactcagaagtgaaacgccgtagcgccgatggtagtgtggggtctccccatgcgagagtagggaactgccaggcatcaaataaaacgaaaggctcagtcgaaagactgggcctttcgttttatctgttgtttgtcggtgaacgctctcctgagtaggacaaatccgccgggagcggatttgaacgttgcgaagcaacggcccggagggtggcgggcaggacgcccgccataaactgccaggcatcaaattaagcagaaggccatcctgacggatggcctttttgcgtttctacaaactcttgagacgttgatcggcacgtaagaggttccaactttcaccataatgaaataagatcactaccgggcgtattttttgagttatcgagattttcaggagctaaggaagctaaaatggagaaaaaaatcactggatataccaccgttgatatatcccaatggcatcgtaaagaacattttgaggcatttcagtcagttgctcaatgtacctataaccagaccgttcagctggatattacggcctttttaaagaccgtaaagaaaaataagcacaagttttatccggcctttattcacattcttgcccgcctgatgaatgctcatccggagttccgtatggcaatgaaagacggtgagctggtgatatgggatagtgttcacccttgttacaccgttttccatgagcaaactgaaacgttttcatcgctctggagtgaataccacgacgatttccggcagtttctacacatatattcgcaagatgtggcgtgttacggtgaaaacctggcctatttccctaaagggtttattgagaatatgtttttcgtctcagccaatccctgggtgagtttcaccagttttgatttaaacgtggccaatatggacaacttcttcgcccccgttttcactatgggcaaatattatacgcaaggcgacaaggtgctgatgccgctggcgattcaggttcatcatgccgtctgtgatggcttccatgtcggcagaatgcttaatgaattacaacagtactgcgatgagtggcagggcggggcgtaactgtcagaccaagtttactcatatatactttagattgatttacgcgccctgtagcggcgcattaagcgcggcgggtgtggtggttacgcgcagcgtgaccgctacacttgccagcgccctagcgcccgctcctttcgctttcttcccttcctttctcgccacgttcgccggctttccccgtcaagctctaaatcgggggctccctttagggttccgatttagtgctttacggcacctcgaccccaaaaaacttgatttgggtgatggttcacgtagtgggccatcgccctgatagacggtttttcgccctttgacgttggagtccacgttctttaatagtggactcttgttccaaacttgaacaacactcaaccctatctcgggctattcttttgatttataagggattttgccgatttcggcctattggttaaaaaatgagctgatttaacaaaaatttaacgcgaattttaacaaaatattaacgtttacaatttaaaaggatctaggtgaagatcctttttgataatctcatgaccaaaatcccttaacgtgagttttcgttccactgagcgtcagaccccgtagaaaagatcaaaggatcttcttgagatcctttttttctgcgcgtaatctgctgcttgcaaacaaaaaaaccaccgctaccagcggtggtttgtttgccggatcaagagctaccaactctttttccgaaggtaactggcttcagcagagcgcagataccaaatactgtccttctagtgtagccgtagttaggccaccacttcaagaactctgtagcaccgcctacatacctcgctctgctaatcctgttaccagtggctgctgccagtggcgataagtcgtgtcttaccgggttggactcaagacgatagttaccggataaggcgcagcggtcgggctgaacggggggttcgtgcacacagcccagcttggagcgaacgacctacaccgaactgagatacctacagcgtgagctatgagaaagcgccacgcttcccgaagggagaaaggcggacaggtatccggtaagcggcagggtcggaacaggagagcgcacgagggagcttccagggggaaacgcctggtatctttatagtcctgtcgggtttcgccacctctgacttgagcgtcgatttttgtgatgctcgtcaggggggcggagcctatggaaaaacgccagcaacgcggcctttttacggttcctggccttttgctggccttttgctcacatgttctttcctgcgttatcccctgattctgtggataaccgtattaccgcctttgagtgagctgataccgctcgccgcagccgaacgaccgagcgcagcgagtcagtgagcgaggaagcggaagagcgcctgatgcggtattttctccttacgcatctgtgcggtatttcacaccgcatagggtcatggctgcgccccgacacccgccaacacccgctgacgcgccctgacgggcttgtctgctcccggcatccgcttacagacaagctgtgaccgtctccgggagctgcatgtgtcagaggttttcaccgtcatcaccgaaacgcgcgaggcagcaaggagatggcgcccaacagtcccccggccacggggcctgccaccatacccacgccgaaacaagcgctcatgagcccgaagtggcgagcccgatcttccccatcggtgatgtcggcgatataggcgccagcaaccgcacctgtggcgccggtgatgccggccacgatgcgtccggcgtagaggatctgctcatgtttgacagcttatc

SEQ ID NO: 353 - DNA, 6855 bp, artificial
  synthetic plasmid vector
  misc_feature (1)..(6855): pOD818
atcgatgcataatgtgcctgtcaaatggacgaagcagggattctgcaaaccctatgctactccgtcaagccgtcaattgtctgattcgttaccaatttacggctagctcagtcctaggtactatgctagcggatcctctagatttaagaaggagatatacatatgagcaaactggaaaaatttacgaattgttatagcctgtccaagaccctgcgtttcaaagccatccccgttggcaaaacccaggagaatattgataataaacgtctgctggttgaggatgaaaaaagagcagaagactataagggagtcaaaaaactgctggatcggtactacctgagctttataaatgacgtgctgcatagcattaaactgaaaaatctgaataactatattagtctgttccgcaagaaaacccgaacagagaaagaaaataaagagctggaaaacctggagatcaatctgcgtaaagagatcgcaaaagcttttaaaggaaatgaaggttataaaagcctgttcaaaaaagacattattgaaaccatcctgccggaatttctggatgataaagacgagatagcgctcgtgaacagcttcaacgggttcacgaccgccttcacgggctttttcgataacagggaaaatatgttttcagaggaagccaaaagcacctcgatagcgttccgttgcattaatgaaaatttgacaagatatatcagcaacatggatattttcgagaaagttgatgcgatctttgacaaacatgaagtgcaggagattaaggaaaaaattctgaacagcgattatgatgttgaggattttttcgagggggaattttttaactttgtactgacacaggaaggtatagatgtgtataatgctattatcggcgggttcgttaccgaatccggcgagaaaattaagggtctgaatgagtacatcaatctgtataaccaaaagaccaaacagaaactgccaaaattcaaaccgctgtacaagcaagtcctgagcgatcgggaaagcttgagcttttacggtgaaggttataccagcgacgaggaggtactggaggtctttcgcaataccctgaacaagaacagcgaaattttcagctccattaaaaagctggagaaactgtttaagaattttgacgagtacagcagcgcaggtatttttgtgaagaacggacctgccataagcaccattagcaaggatatttttggagagtggaatgttatccgtgataaatggaacgcggaatatgatgacatacacctgaaaaagaaggctgtggtaactgagaaatatgaagacgatcgccgcaaaagctttaaaaaaatcggcagctttagcctggagcagctgcaggaatatgcggacgccgacctgagcgtggtcgagaaactgaaggaaattattatccaaaaagtggatgagatttacaaggtatatggtagcagcgaaaaactgtttgatgcggacttcgttctggaaaaaagcctgaaaaaaaatgatgctgttgttgcgatcatgaaagacctgctcgatagcgttaagagctttgaaaattacattaaagcattctttggcgagggcaaagaaacaaacagagacgaaagcttttatggcgacttcgtcctggcttatgacatcctgttgaaggtagatcatatatatgatgcaattcgtaattacgtaacccaaaagccgtacagcaaagataagttcaaactgtatttccagaacccgcagtttatgggtggctgggacaaagacaaggagacagactatcgcgccactattctgcgttacggcagcaagtactatctcgccatcatggacaaaaaatatgcaaagtgtctgcagaaaatcgataaagacgacgtgaacggaaattacgaaaagattaattataagctgctgccagggcccaacaagatgttaccgaaagtatttttttccaaaaaatggatggcatactataacccgagcgaggatatacagaagatttacaaaaatgggaccttcaaaaagggggatatgttcaatctgaatgactgccacaaactgatcgatttttttaaagatagcatcagccgttatcctaaatggtcaaacgcgtatgattttaatttctccgaaacggagaaatataaagacattgctggtttctatcgcgaagtcgaagaacagggttataaagttagctttgaatcggccagcaagaaagaggttgataaactggtggaggagggtaagctgtatatgtttcagatttataacaaagactttagcgacaaaagccacggtactcctaatctgcatacgatgtactttaaactgctgtttgatgagaataaccacggccaaatccgtctctccggtggagcagaactttttatgcggcgtgcgagcctaaaaaaggaagaactggtggtgcatcccgccaacagcccgattgctaacaaaaatccagataatcctaagaagaccaccacactgtcgtacgatgtctataaggataaacgtttctcggaagaccagtatgaattgcatataccgatagcaattaataaatgcccaaaaaacattttcaaaatcaacactgaagttcgtgtgctgctgaaacatgatgataatccgtatgtgatcggaattgaccgtggggagagaaatctgctgtatattgtagtcgttgatggcaagggcaacatcgttgagcagtatagcctgaatgaaataattaataattttaacggtatacgtattaaaaccgactatcatagcctgctggataaaaaggagaaagagcgttttgaggcacgccaaaattggacgagcatcgaaaacatcaaggaactgaaggcaggatatatcagccaagtagtccataaaatctgtgaactggtggagaagtacgacgctgtcattgccctggaagacctcaatagcggctttaaaaacagccgggtgaaggtggagaaacaggtataccaaaagtttgaaaagatgctcattgataagctgaactatatggttgataaaaagagcaacccgtgcgccactggcggtgcactgaaagggtaccaaattaccaataaatttgaaagctttaaaagcatgagcacgcagaatgggtttattttttatataccagcatggctgacgagcaagattgaccccagcactggttttgtcaatctgctgaaaaccaaatacacaagcattgcggatagcaaaaaatttatttcgagcttcgaccgtattatgtatgttccggaggaagatctgtttgaatttgccctggattataaaaacttcagccgcaccgatgcagattatatcaaaaaatggaagctgtacagttatggtaatcgtatacgtatcttccgtaatccgaagaaaaacaatgtgttcgattgggaagaggtctgtctgaccagcgcgtataaagaactgttcaacaagtacggaataaattatcagcaaggtgacattcgcgcactgctgtgtgaacagtcagataaagcattttatagcagctttatggcgctgatgagcctgatgctccagatgcgcaacagcataaccggtcgcacagatgttgactttctgatcagccctgtgaagaatagcgacggcatcttctacgattccaggaactatgaagcacaggaaaacgctattctgcctaaaaatgccgatgccaacggcgcctataatattgcacggaaggttctgtgggcgattggacagttcaagaaagcggaagatgagaagctggataaggtaaaaattgctattagcaataaggaatggctggagtacgcacagacatcggttaaacactgacccgggaagcttggctgttttggcggatgagagaagattttcagcctgatacagattaaatcagaacgcagaagcggtctgataaaacagaatttgcctggcggcagtagcgcggtggtcccacctgaccccatgccgaactcagaagtgaaacgccgtagcgccgatggtagtgtggggtctccccatgcgagagtagggaactgccaggcatcaaataaaacgaaaggctcagtcgaaagactgggcctttcgttttatctgttgtttgtcggtgaacgctctcctgagtaggacaaatccgccgggagcggatttgaacgttgcgaagcaacggcccggagggtggcgggcaggacgcccgccataaactgccaggcatcaaattaagcagaaggccatcctgacggatggcctttttgcgtttctacaaactcttgagacgttgatcggcacgtaagaggttccaactttcaccataatgaaataagatcactaccgggcgtattttttgagttatcgagattttcaggagctaaggaagctaaaatggagaaaaaaatcactggatataccaccgttgatatatcccaatggcatcgtaaagaacattttgaggcatttcagtcagttgctcaatgtacctataaccagaccgttcagctggatattacggcctttttaaagaccgtaaagaaaaataagcacaagttttatccggcctttattcacattcttgcccgcctgatgaatgctcatccggagttccgtatggcaatgaaagacggtgagctggtgatatgggatagtgttcacccttgttacaccgttttccatgagcaaactgaaacgttttcatcgctctggagtgaataccacgacgatttccggcagtttctacacatatattcgcaagatgtggcgtgttacggtgaaaacctggcctatttccctaaagggtttattgagaatatgtttttcgtctcagccaatccctgggtgagtttcaccagttttgatttaaacgtggccaatatggacaacttcttcgcccccgttttcactatgggcaaatattatacgcaaggcgacaaggtgctgatgccgctggcgattcaggttcatcatgccgtctgtgatggcttccatgtcggcagaatgcttaatgaattacaacagtactgcgatgagtggcagggcggggcgtaactgtcagaccaagtttactcatatatactttagattgatttacgcgccctgtagcggcgcattaagcgcggcgggtgtggtggttacgcgcagcgtgaccgctacacttgccagcgccctagcgcccgctcctttcgctttcttcccttcctttctcgccacgttcgccggctttccccgtcaagctctaaatcgggggctccctttagggttccgatttagtgctttacggcacctcgaccccaaaaaacttgatttgggtgatggttcacgtagtgggccatcgccctgatagacggtttttcgccctttgacgttggagtccacgttctttaatagtggactcttgttccaaacttgaacaacactcaaccctatctcgggctattcttttgatttataagggattttgccgatttcggcctattggttaaaaaatgagctgatttaacaaaaatttaacgcgaattttaacaaaatattaacgtttacaatttaaaaggatctaggtgaagatcctttttgataatctcatgaccaaaatcccttaacgtgagttttcgttccactgagcgtcagaccccgtagaaaagatcaaaggatcttcttgagatcctttttttctgcgcgtaatctgctgcttgcaaacaaaaaaaccaccgctaccagcggtggtttgtttgccggatcaagagctaccaactctttttccgaaggtaactggcttcagcagagcgcagataccaaatactgtccttctagtgtagccgtagttaggccaccacttcaagaactctgtagcaccgcctacatacctcgctctgctaatcctgttaccagtggctgctgccagtggcgataagtcgtgtcttaccgggttggactcaagacgatagttaccggataaggcgcagcggtcgggctgaacggggggttcgtgcacacagcccagcttggagcgaacgacctacaccgaactgagatacctacagcgtgagctatgagaaagcgccacgcttcccgaagggagaaaggcggacaggtatccggtaagcggcagggtcggaacaggagagcgcacgagggagcttccagggggaaacgcctggtatctttatagtcctgtcgggtttcgccacctctgacttgagcgtcgatttttgtgatgctcgtcaggggggcggagcctatggaaaaacgccagcaacgcggcctttttacggttcctggccttttgctggccttttgctcacatgttctttcctgcgttatcccctgattctgtggataaccgtattaccgcctttgagtgagctgataccgctcgccgcagccgaacgaccgagcgcagcgagtcagtgagcgaggaagcggaagagcgcctgatgcggtattttctccttacgcatctgtgcggtatttcacaccgcatagggtcatggctgcgccccgacacccgccaacacccgctgacgcgccctgacgggcttgtctgctcccggcatccgcttacagacaagctgtgaccgtctccgggagctgcatgtgtcagaggttttcaccgtcatcaccgaaacgcgcgaggcagcaaggagatggcgcccaacagtcccccggccacggggcctgccaccatacccacgccgaaacaagcgctcatgagcccgaagtggcgagcccgatcttccccatcggtgatgtcggcgatataggcgccagcaaccgcacctgtggcgccggtgatgccggccacgatgcgtccggcgtagaggatctgctcatgtttgacagcttatc

We claim:

1. A composition comprising:
(i) a Cms1 polypeptide, or a polynucleotide encoding a Cms1 polypeptide, and
(ii) a guide polynucleotide, or a polynucleotide encoding a guide polynucleotide,
wherein said guide polynucleotide is designed to interact with a Cms1 polypeptide and to hybridize with a targeted sequence in one or more bacterial cells of interest, wherein said targeted sequence is located immediately downstream of a PAM sequence that is recognized by said Cms1 polypeptide.

2. The composition of claim 1, wherein said Cms1 polypeptide shares at least 80% identity with a sequence selected from the group consisting of SEQ ID NOs:41-160 and 340-341, or is encoded by a polynucleotide that shares at least 80% identity with a sequence selected from the group consisting of SEQ ID NOs:161-317 and 342-343 and wherein said guide polynucleotide is designed to interact with a Cms1 polypeptide and to hybridize with a targeted sequence in one or more bacterial cells, wherein said targeted sequence is located immediately downstream of a PAM sequence that is recognized by said Cms1 polypeptide.

3. The composition of claim 1, wherein said Cms1 polypeptide comprises a sequence selected from the group consisting of SEQ ID NOs:41-160 and 340-341, or is encoded by a polynucleotide that comprises a sequence selected from the group consisting of SEQ ID NOs: 161-317 and 342-343.

4. The composition of claim 1, wherein said one or more bacterial cells is a pathogenic bacterial species.

5. The composition of claim 4, wherein said one or more bacterial cells is a pathogenic bacterial species associated with plants.

6. The composition of claim 4, wherein said one or more bacterial cells is a pathogenic bacterial species associated with mammals.

7. The composition of claim 6, wherein said one or more bacterial cells is a pathogenic bacterial species associated with humans.

8. The composition of claim 1, wherein said one or more bacterial cells is a cell of a bacterial species selected from the group consisting of Xanthomonas sp., Escherichia sp., Pseudomonas sp., Envinia sp., Xylella sp., Clavibacter sp., Ralstonia sp., Pectobacterium sp., Streptomyces sp., Burkholderia sp., Phytoplasma sp., Acidovorax sp., Pantoea sp., Agrobacterium sp., Spiroplasma sp., Candidatus Liberibacter sp., Dickeya sp., Serratia sp., Sphingomonas sp., Rhizobacter sp., Rhizomonas sp., Xylophilus sp., Rickettsia sp., Bacillus sp., Clostridium sp., Arthrobacter sp., Curtobacterium sp., Leifsonia sp., Rhodococcus sp., Phytoplasma sp., Enterobacter sp., Citrobacter sp., Klebsiella sp., Hafnia sp., Corynebacterium sp., Mycoplasma sp., Serratia sp., Pasteurella sp., Proteus sp., Campylobacter sp., Salmonella sp., Pseudomonas sp., Brucella sp., Staphylococcus sp., Streptococcus sp., Trueperella sp., Clostridium sp., Listeria sp., Anthrax sp., Bartonella sp., Capnocytophaga sp., Streptobacillus sp., Rickettsia sp., Anaplasma sp., Shigella sp., Borrelia sp., Actinomyces sp., Bacteroides sp., Bordetella sp., Chlamydia sp., Chlamydophila sp., Ehrlichia sp., Enterococcus sp., Francisella sp., Haemophilus sp., Helicobacter sp., Klebsiella sp., Legionella sp., Leptospira sp., Mycobacterium sp., Neisseria sp., Nocardia sp., Treponema sp., Vibrio sp., Yersinia sp., Coxiella sp., Wolbachia sp., Liberibacter sp., Aeromonas sp., Edwardsiella sp., Flavobacterium sp., Tenacibaculum sp., Renibacterium sp., Piscirickettsia sp., Enterobacterium sp., Lactococcus sp., Aerococcus sp., and Hepatobacter sp.

9. The composition of claim 1 wherein said guide polynucleotide is a guide RNA.

10. A method of killing one or more bacterial cells comprising introducing the composition of claim 1 into said one or more bacterial cells.

11. The method of claim 10, wherein said introducing comprises contacting said one or more bacterial cells with a phage or a phagemid engineered to comprise:
(i) a polynucleotide encoding a Cms1 polypeptide, and
(ii) a polynucleotide encoding a guide polynucleotide,
wherein said polynucleotide encoding a Cms1 polypeptide shares at least 80% identity with a sequence selected from the group consisting of SEQ ID NOs: 161-317 and 342-343, or encodes a polypeptide that shares at least 80% identity with a sequence selected from the group consisting of SEQ ID NOs:41-160 and 340-341, and wherein said guide polynucleotide is designed to interact with a Cms1 polypeptide and to hybridize with a targeted sequence in said one or more bacterial cells, wherein said targeted sequence is located immediately downstream of a PAM sequence that is recognized by said Cms1 polypeptide.

12. The method of claim 10 wherein said introducing comprises contacting said one or more bacterial cells with a phage or a phagemid engineered to comprise:
(i) a polynucleotide encoding a Cms1 polypeptide, and
(ii) a polynucleotide encoding a guide polynucleotide,
wherein said polynucleotide encoding a Cms1 polypeptide comprises a sequence selected from the group consisting of SEQ ID NOs: 161-317 and 342-343, or encodes a polypeptide that comprises a sequence selected from the group consisting of SEQ ID NOs:41-160 and 340-341, and wherein said guide polynucleotide is designed to hybridize with a Cms1 polypeptide and to hybridize with a targeted sequence in said one or more bacterial cells, wherein said targeted sequence is located immediately downstream of a PAM sequence that is recognized by said Cms1 polypeptide.

13. The composition of claim 1 wherein said polynucleotide encoding a Cms1 polypeptide and said polynucleotide encoding a guide polynucleotide are part of a vector.

14. The composition of claim 13 wherein said vector is selected from the group consisting of phages, phagemids, and conjugative plasmids

15. The composition of claim 1 wherein said polynucleotide encoding a Cms1 polypeptide and said polynucleotide encoding a guide polynucleotide are part of the same polynucleotide.

16. The composition of claim 14 wherein said engineered phage or phagemid is derived from a phage selected from the group consisting of M13, lambda, p22, T7, Mu, T4 phage, PBSX, P1Puna-like, P2, 13, Bcep 1, Bcep 43, Bcep 78, T5 phage, phi, C2, L5, HK97, N15, T3 phage, P37, MS2, Q.beta., or Phi X 174, T2 phage, T12 phage, R17 phage, M13 phage, G4 phage, Enterobacteria phage P2, P4 phage, N4 phage, Pseudomonas phage .PHI.6, .PHI.29 phage and 186 phage.

17. The method of claim 10, wherein said one or more bacterial cells is a pathogenic bacterial species.

18. The method of claim 17, wherein said one or more bacterial cells is a pathogenic bacterial species associated with plants.

19. The method of claim 17, wherein said one or more bacterial cells is a pathogenic bacterial species associated with mammals.

20. The method of claim 19, wherein said one or more bacterial cells is a pathogenic bacterial species associated with humans.

21. The method of claim 10 wherein said one or more bacterial cells is a cell of a bacterial species selected from the group consisting of Xanthomonas sp., Escherichia sp., Pseudomonas sp., Envinia sp., Xylella sp., Clavibacter sp., Ralstonia sp., Pectobacterium sp., Streptomyces sp., Burkholderia sp., Phytoplasma sp., Acidovorax sp., Pantoea sp., Agrobacterium sp., Spiroplasma sp., Candidatus Liberibacter sp., Dickeya sp., Serratia sp., Sphingomonas sp., Rhizobacter sp., Rhizomonas sp., Xylophilus sp., Rickettsia sp., Bacillus sp., Clostridium sp., Arthrobacter sp., Curtobacterium sp., Leifsonia sp., Rhodococcus sp., Phytoplasma sp., Enterobacter sp., Citrobacter sp., Klebsiella sp., Hafnia sp., Corynebacterium sp., Mycoplasma sp., Serratia sp., Pasteurella sp., Proteus sp., Campylobacter sp., Salmonella sp., Pseudomonas sp., Brucella sp., Staphylococcus sp., Streptococcus sp., Trueperella sp., Clostridium sp., Listeria sp., Anthrax sp., Bartonella sp., Capnocytophaga sp., Streptobacillus sp., Rickettsia sp., Anaplasma sp., Shigella sp., Borrelia sp., Actinomyces sp., Bacteroides sp., Bordetella sp., Chlamydia sp., Chlamydophila sp., Ehrlichia sp., Enterococcus sp., Francisella sp., Haemophilus sp., Helicobacter sp., Klebsiella sp., Legionella sp., Leptospira sp., Mycobacterium sp., Neisseria sp., Nocardia sp., Treponema sp., Vibrio sp., Yersinia sp., Coxiella sp., Wolbachia sp., Liberibacter sp., Aeromonas sp., Edwardsiella sp., Flavobacterium sp., Tenacibaculum sp., Renibacterium sp., Piscirickettsia sp., Enterobacterium sp., Lactococcus sp., Aerococcus sp., and Hepatobacter sp.

22. The method of claim 12 wherein said phage or a phagemid is derived from a phage selected from the group consisting of M13, lambda, p22, T7, Mu, T4 phage, PBSX, P1Puna-like, P2, 13, Bcep 1, Bcep 43, Bcep 78, T5 phage, phi, C2, L5, HK97, N15, T3 phage, P37, MS2, Q.beta., or Phi X 174, T2 phage, T12 phage, R17 phage, M13 phage, G4 phage, Enterobacteria phage P2, P4 phage, N4 phage, Pseudomonas phage .PHI.6, .PHI.29 phage and 186 phage.

23. The method of claim 10 wherein said guide polynucleotide is a guide RNA.

24. The composition of claim 1 wherein said PAM sequence that is recognized by said Cms1 polypeptide is selected from the group consisting of NACTV, NATVR, BATCC, YATGC, NATTN, NCCTR, NCTMR, VCTCC, NCTKV, NGCTR, KGCTC, NGTRR, NGTCV, TGTGC, NGTTN, ATARG, RTACR, NTATV, HTCAR, ATCAC, RTCSV, YTCGA, VTCTN, TTCTR, NTGTV, ATTAT, DTTCN, CTTCK, NTTRV, ATTGT, and NTTTN.

25. The method of claim 11 wherein said PAM sequence that is recognized by said Cms1 polypeptide is selected from the group consisting of NACTV, NATVR, BATCC, YATGC, NATTN, NCCTR, NCTMR, VCTCC, NCTKV, NGCTR, KGCTC, NGTRR, NGTCV, TGTGC, NGTTN, ATARG, RTACR, NTATV, HTCAR, ATCAC, RTCSV, YTCGA, VTCTN, TTCTR, NTGTV, ATTAT, DTTCN, CTTCK, NTTRV, ATTGT, and NTTTN.

26. The composition of claim 1 wherein said Cms1 polypeptide comprises one or more amino acid motifs selected from the group consisting of SEQ ID NOs:1-34.
